United States Patent Application Publication US 2024/0132992 A1 - sequence listing, part 2

SEQ ID NO: 2 - DNA, 6856497 bp, Pseudomonas sp. BR8764 (residues 1,714,126-3,428,250 of 6,856,497)
atcactacccgtccattggccctcgtcaccggcgcctcttctggcatcggccgcgccttcgccgtgcagctcgcagcactgggctatgacctgatcgtggtcgcgcgccgtcgtgaacggctcgaagcactggccagcgccctgccccaggtcagcgttcagccgctggtggccgacctcgccacccgcgccggtatcgatacagtggctgccgcgtgtgcgaacgaaccccttaccttgctggtcaacaacgcgggcgtcgcccattacatgccgttcgccgatttgcccacggacaaggccagcgaactgctgcacgttaaagtcctcgccccgaccctgctggcccacgccgccgtgcccggcatgctggcacgcggcggcggaaccgtgatcaatgtggccggcatgctcgcctacagcggcccggcgcccttggagcaactgcccgtgcggcgcgcggtgtataccgggacgctggcgcatttagtggcgttttcgcagacgctgcacgaggaactcaagggtcagggcctgaaggtgcaggtgctgtgcccgggcgtggtggctaccgaattccatgaacgccagggtatggacttgagcgccgtgccacgcatggccgccgatgatgtggtcaccgccagcctgcgcgggttggcgctcggggaagtggtctgcgcacccggtgtggagcatgccgaactgctcggcatcgcagcgagtgccagccttggcgctttcgcagggcaatcaccacagttggcccggcgttattctgaatagtccggtacggcaaacacctccacgcgggaggtgtttgccgttcaggtgcgttgttacttcgtaaacaactgggcgacgctggtgatattcgcctggcccagaccttcgatcatgccgtgctgaaacaccccgcgcgccgcggcaatggtcggcgcagcgtcagcggagcctgctgcgtcgagggcataaccgaagtctttctccatcaactccaccgggaatctcggtgcgttatcgcccgcgagcatcaagccgaccatttgccgcgccgccgcactcgacacgggcgtgccgccgatcacctcgaacacccgcgcagcatccgcgccggcgcgctggagaatacccatcagttccgccaaaaccgctacttgcacaccgagcaatgcattggtgcccagtttggtcaatgccccggcccccaagggaccgacaaggtgcagggatgaacccagcacattcaacaagggccgtgcgcgctcaaaggtctgggcatcgccacccaacagatacacaagctgggcggtttcggcctgtgggcgggagcccgacaccggcgcttcgagcaacgacacgccgtgcgcagccgcttcgccacccaactcacgctcccaatgtggcgacagggtcgagctttcaatcgccaccgcgcctttggccattcccgccagcgcgcccttcagcgggtcgagccacacctggcgcgatgcgctgtcatcacgcaccatcgagaacacaaactcggcgcccttggccgcgtctttcgggctgctggcgtgctgtgcgcccttgaccaccagttcatcggccgcctcaggcgcacgattccatacggttacccggtggccggcattgagcaaattcaacgccatgcgcgaacccatggctccgatacctaaaaatgctacgttcgacatggctaaaacctcgttgaagggttgggcgttcagtcagatgccctggccaccggacacttcgatgcgttgggcattgacccagcgattgtcctcagacaacaagctggcaatcatcggaccgatatcgtccggcacaccggcgcggcccagggctgtcatgtcggcaaagatcttgttcacgtcggggttatcgcgcaccgcgccgccgccaaaatcagtctcgatggcgcccggtgccacggtattgaccgcaatgccacggctgccgaactccttggccatgtagatcgacaacacttcaacggcggccttgaccgccgcataggcagcgtagcccgggaaggacacacgggtgagcccgctggacaggttgacgatacggccaccgtcggcgatcagcggcagcaaggtctgggtcaggaaatacacgcccttgaaatgcacattcaccaaaccgtcgaactgcgcttcgctggtttggtcgatcagggcgtagtcgccatgaccggcgttgttcaccaggtggtcaaagctttcgcgctgccaggtatcgcgaagcacggcgcgcaaggcggtggcaaacgcggcaaagcctgtcacatcgccggtgtccagttgcaaggccaccgctttgcggcccagggcttggatttcggcgaccacggccagtgcctcttcggcacggcgctggtaggtaacgatcacatccccgccacggcgggcaatgctcaaggcggtattacggccgaggccgcggctggcgccggtgacgatagcgatctgggtcatggcaaaactcctcagtgggtgtgaggccatgataggaaagcgcgcgccgcagagcgttgccggaaactgggtgttgtttgcccaatcctcccaactgtggcgaaagggcttgttgtggcagcaagcccggctgatgcgtcaggcagacgctttggcccaacccttgaacgcttcaacgtccttgatcggtggcaagccaaacatgcgtgcgtattcgcggttgaattgcgagacgctttcatagccgacattgaatgcggcactgctggccgaggcgccttcggccaacagcattcggcgtgcctcgatcaaccgcaggttcttctggaattgcaggggcgacaatgacgtgactgcgcgaaaatgccggtggaaggatgacgggctcatgccggcggtagccgccagttggtcaaccggcaatggccgcttgtagtcggcccgcaacacggccaccgcccgtgccacacgctgggcctgaccttcaacacagcccaactgacgaatcgccgcgccatggcgccccaccagcaaccagtagtgcagttcacgcaccagttgtgcatgcaggaccgggccggacgccgggaaatccaggatacgcatcaggcgcagtgccgtgtccaccacctgggcgtcggtgcgctcggcagcctttagcgccagaccgggcaacgcctgttgaggtttgatctgcagcgacaactcggcaatcaccgtcgggtccaggtccagcacgatagacaggtaaggtgcctgggggctggcctgggtgatctggctgaccgtcggcacatcggcggtaatcagcaacgaatccccggcgtggaaggtaaacgtctgggtacccatggtcacctccttggtgccttgcaggatcaggcagatcaaagggttgggcatcgaatggagcaagccgctgggggtgttcgaacgaatcgtggtcaaaccgggcaccggcgtctgggccacgccgttggcatcggcgttggcctcaacgtaggcgcgaaccgcgtcgagcaatgtgggggtcatggagggggatccgaggtcggccagtcaatagcgggtgaatttcatcctacttcagcaacacccggggaataaaggtgttgtccgtacgtcacacccaaaatggcatgtaaagattatttaaattgaacgttttaatacaaagtaacgaataatttaagttagccagcaggtcggttatctagacgactcttatcactaaaccgttaacagtctgaacatgaactgaatggctcctgcttcaaaaaagatgtacttgacggccattaaagcgacaccctattgtcagcaaaagcgttacacagtttcacttgaactctgtaaatacggggtcttcagccctcccgccaaggaaagcggataactattcaaccgaaatccggcctgcatacttattcgtgtcgacaggccttaaaagtatccgggcttacagctcccgtgtccgcgccggaacgctcactcactctatgccagcgtgattgaacaatgatccgatgtgtacgtatctggactaacgcgcaaggcaactcggtttttgcagaaggcactatcgaacttcccaagggcgcaccgttgttcaacgccaacgcctgactttcctactgaaggtacccccatgtccccagcaactgtttcccgaacggctgatgtactcctgatcggcgccggcatcatgagcgccaccgtcggcaccctgctcaaggagctggagcccggccttgaaatcgccatgtacgaggcgctgcacgactgcgcccaggaaagctccgacggctggaataacgccggcacgggccatgcggccaattgcgagctcaattacacaccgctcaaacccgacggcacggtagacatcaccaacgcgctggaagtgaacgtggaattcgacatctcccgccagctctggacctacctggtgcgcaaaggcgcgattgccgaccctggcgcgttcattcatgcctgcccgcacatgagctttgtgaccggcgaggaaaaccgcgacttcctgcgcaaacgcttccaggccatgtcggcccaccactgttaccacggcatggagtacagcgaagacccgcacgtcatcgccggctgggcgcctctggtgatggaggggcgtgaccccaaggaaatcgtcgccgccacgcgcatgatcagcggctccgatgtggactacggtgccctcacccacctgctggttgcccacctggccaaacagccgggctttaccgtgcagtacgggcatcaagtggtagccctcggccgcagtgacgacggccagtggttggtcaaggtcaaagacctggcgaccggcgccacgcaaaccacccaggccaaattcgtgtttatcggtgcgggcggtgcgtccatcgagctgttgcagaagtccggtatccccgaaggccacggttatgcaggcttccccgtcagtggcatctggctgcggtgtgatgtcgccgaagtggccgcgtgtcaccaggccaaggtctatggcaaagccccccatggttcgccgccgatgtcggtgccgcacctggacacacgcatcatcggcggtaaacgttcgatgctgttcgggccgtatgccgggttctccagcaagtttctcaagtctggttcctacctggacctgttcaagtcgatccgccctgccaaccttgcgccgatgctcgacgtggccgtgcacagctgggacctggaaaagtacctgatcagccaggtcacccagaccgccgacgagcgcttcgcctcactcaaggaatttttccccaacgccacccaggccgactggaaagaagccgtggccggccagcgcgtgcagatcatcaagcctaccggccacggcggcggccaattggttttcggcaccgagctgattgccgcgcaggacaagtccatcgtggctttgctaggcgcgtccccgggcgcctccactgccgcacatatctcgctgcaagtgctgcaaaaatgcttcgccgacaagctcacgccagacgcctggctgccgcgcttgcgggccatcattcccacctatggcatggatttgaaaaccgacggcgatgcttgccacgcatcccgcgccgacacggcacaggtgctgggcttgcagaatgtctgaggtgccactcgagcgcgtggcccatctgaccgcgcgcatcgggcggatgttgctgacccacggcgccgacacccggcacacgcaacgcattgtgtgcgaggtggcccgcgccctgggccacccggtgcaggtcctggtcacggccgaggcactgttggtcacggtgggcgacgaggcgcagttccagaccaaagtcggccatgccctgagcgcgatgaccgtggacatgggcacgctgatggccttgcagcgtgtggttgacggcatttgcctgggcacgctcaaagcgcaagcgattgatacccggctcgatgctgtggaacaggcgccacgcgagcactcggcgctggtgatgacgctgggcattgccatgacggctgcatcgttggcccgcctgtttggcgcgcagtggtcagtggtggcggcggcgtttgtcgccgggttgctcagcgtggtgctgcgccggctgctgggccgttactcactcaatggcgtggcgacgatgtttgtcaccgcgttactcagtggcgtggccagcatcctggtgttgcgcgcatttccaggggtttctcccgtgctgtgcctcaccgctgccgggatgatcctggtgcccggcgcgccactgatcaacggcgtgcgcgacctggtcagcgggcaccccgacagcggcctggctcgggttgccaccggggcgataacggtgctggtgatcagttttgcactgttcatcgccgctgccctggccggcgacagcttgccggtcgatagcgggccgggctcattgccgctgggccaggacgtcgtgtttgcggccaccgctgcggccggttacgcgctgtttttcaacgtgccctggcgcgcgctgtgggtgtgcgtgctgtgtggcatggcagcccatggcctgcgcacgctggcgcagcaccacgggctggacttggcctgtgcgtcactgctcggcgcgttcgctgccggcctggtcgcactgatcgccggggcccgcctgcgggtaccgccggtggcgtttgcatttcccggcatcgttgcgctggtcccgggttcctatgggtttcgcgccggtatgggcggtttgcaattgatgtcgctcggcgccgattcccccgtggttttgatcgctgacaccacttcgctggccatcaccacggtgattgtcagtgctgccatcgccgtgggcttgttgctcgcgctggcagttcaacctgaacgccatttatctgatgagggttaagagatgacagacattccaatcggcctggaggccaccggcaaccgcattgaattcgacagcatgggcagcgttgaggtgcccgccgaaaaatactggggcgcgcagacccagcgttccctgcagcatttttccatcggcaatgaccgcatgcccaaagcggtgtatcacgcctacggcgtggtgaaaaaagcctgtgcgctggtcaacgccgccgccgggcgcctgccgcaacacaagcgtgacgccatcgtgcaggccgccgacgaagccatcgccggcaagctcgacgagcacttcccgctgtacgtgtggcaaaccggctcgggcacccagtcaaacatgaacgtcaatgaagtgctgtccaaccgcgcgattcagttgctcggcggcaccctcggcagccagcagcccgtggggccgaacgatgacgtgaacatgggccagtcctccaacgacagctttcccaccgccatgcacatcgccgccgtgaccctgatcgatgaccgcctggtgccggaactgaaccgcctggccgcaaccatcgaggccaaagccaagggctggatggacgtgatcaaggtcggccgcacccacctgcaagacgccacgccgctgtcggtcggccaggaatggagcggctgggccgcgcagattcgccgttgcaccgccgagatcgaacgcagccgtgaaggcctctacgaactggcgctgggcggcactgccgtgggcaccggcttgaacgccccggctggtttttcggcaactatcgccgcaaaaattgccgaactcaccggcaagcccttcgtcaccgcgccgaacaaattcatggcccaaggctcgctcgacgccatggtcagggccagtgcggcattgcgtggtgctgcggtggcgctgatgaaaatcgccaacgacatgcgctggctcgcctcaggcccgcgctgcggctttggcgaactgcaactgcctgcgaacgaacccggctcctcgatcatgcccggcaaggtcaacccgacccagtgcgaagccatggtgatgatcgcgattcaggtgatcggcgacgacaccgccattgccttcgccggcagccagggcaacttcgaactgaacgcgatgcgcccgatcatcatcaacaacttcctgcactcggcgaccctcctcgccgacggctgcgagaaattccgtacctattcggtcgaaggcacggacctcaaccgcgaaaaaatccagggctacctggacaacaacctgatgctggtgacggcgctgtcgccggtgatcggctaccagaacgcggcgcacattgccgaagatgcccaggccacgggctcgacactcaaggccgccgcgttgaaatccggcaaaatcagcgagcaggattacgaccggatcatcgtgcccggggacatggtcggggaaggtgtagcaggcgcctgaccgccagaaacctgtgccgggttccggcacaggtgttcatcactcagtagttggcactcggattacccacatccacgtagccatttttcggtgcggtaatcacatccagcggcggcggcgtgacgccgaaccccttgaattgatccgtgagccccttgtaccagtcttcttgctgtttcttgcgcgcgttgtcggccttgatgtcggcaatgatcgcgtagatcagcccgcccaccgccgccaccccgcccaccgcaccggccagcgcgcccgccgccccgccgatgacgcctgcggcttcggcaacgcctgcggccacggtggtgatgcgcggcaccacataggtggcgacttccacggccccggccacggcagacaaaccattgaggccggcaaacgtgccctgaaagcccgcagcgactttatcgccactctgcgccgagttcttcgctgaaatcgccccggtgaccaaacccaacacgttaccagtgacgccccccaggctcttgccgacgttctccacgtctttgacgaatttgggcgcatcaaacttgtacgtgccctgcttggtgcggtcgaactggtcctggacgaacttggcaccgccctccatcaacagccccgccgcctgaaacgactggcctacggtttgcgccgtgctgccgcccttgccgctggcgatccgcgtaccgatggcgccggccagcaacacgccggacacgccgtgcatcaccccggccttgtaggttgcgctcaccccggcgggtagtttgccgccccagctgctttggactttcttgatcgcgtcatcaaatttggcgccgccacgcatggcgtcttccaccgcgcgaatgccgctgatgatgtcggcggttttcggtggcgcttcgccgggcacggtgaacgcggcaatgttgtcgttgatgacctgctcaaggcgcgggtcattggcgccggtaacgcccaggccccggtagaagtcgtcgatggtctggcccttgagcaagtcctcgcgacccagcttggcggcagcatcgttgaaggtcgcactgcccgcctgcacggttttatcgtcgagcacggcgtcgaagacagccttgttcacgccggactgaatcaccgccttgtcggccggcacgccgctggcgatcagatcgtcgatttctttgccggaagtaatgtgcgcgtattcggccttgaccttgtccttgatggcttgcggggcattttccagggcttttttgtagtccggctgcttgccgagggcctgggcgtagaagtccgggtatttgataaaactcgacaacgcgtccgtggtactggcgcccttggtggcaaacgcactttccagcgcatcggtgctggatgaagcttcgaggcgccgctccatctcggctttcagggccgggtcggcggcgacggttttctgcagctgctcggtgccctgggtgttgagaaactgttggacatccgggtccttactgagcgtgtcgatacggctttgtacgtcgttgatgaagtcttcgcgctgctggcccggcgacttgccgtcaccggcccactgattggcgccgtccgggccctggtgcgcgaaggcgtcggcaccggccttgtagttggccaggcccgtggacagttgaatgatggctgcggtcttgtccgcgccactggcactgctgttgccgctgacaaagtagtcggcgccaaccttggaggcatcgccaccggcggcctttaccgcgtcttcagtggccttggcgttgaggtccttgatctggtcgtcggcgctgttaccgtccaggcccttgaggttgtcgtagccgtatttgccgaagtcctgcaggcgcccggcctcggtgccgtggcgcgcttcgccatccttggtaaacccgtcgatgcggccattgcccacctcgccgccttcgatgtgtttgccggtctcgtcatagttctcgacgtagttgagcacctgggccgcgcgccaggccgcgtccgggtcatgctcaaagtcaccgacgcgctcacgcagcttgtctttaacgccgctctggttgccgaggtttttcaacagggggttgtcgtcgatgatttgctgcgcgctgcgcgtgtcacccactgggcgcccttcaccgggcaatggcaggtggttggagggtgcatcaccctttggcggggccttgggtttgctcaccggcagcgtgcctttgagggtgtcccagccgtatttgccgaagtcctgcaggcgcccggcttcggtgccatggcgtgcgtcaccgcctatggtgaacccgtcgatcttgccgttgccggcgtcgttgagttctgcgcgtttaaccgtgggtttgccgttttcgtcgagtttttcgatgtgctccagcacgcggctggcgcggtaggcggcgtccgggtcgtgctcgaaatcccccacgcgctcacgcagcttgtctttcacgccgctctggttgccgaggtttttcagcagggggttgtcatcgatgatctgttgcgcggtacgaaagtcaccgggcggccgctttgtatccggcccgaggctgttgtcgccaggcgggttgtccactgccctggaaaccgccttgttccagttggggttatcgcccgccttgggggtgctgtcgaccgggttcacctgcatgaccttctcctgttacggcatgggagccggattattggacggcaagtgcaacagtcttgttacatgcggacaattggttatggcgacacagataatgaactttaagctcgcaactcgatgacttttacgtggattatcggaggtaattcttcaccgtaacctgtgcccatagcgcaagcacaccgccttgcgccgcacacgaacggagcttcccatgacctcatccactgcccgccaactcgaaggaaaagtcgcgctgattaccggcgccagttccggcatcggccgtgccaccgcccttgtgctcgcccggcgcggcgccaagattgtcgcggcggcgcgccgtcaaagtgaactggacgacgtggtggcccagatcaccgctgaaggcgggattgccgtctccatcgtggtcgatgtcacccgcgaagccgacatcatcgccatggtccaatttgccgtgagcacctacggcaagctcgacattgccttcaacaacgccggcaccgagggcgtattcgcgccactgatcgagcaggacaacgcgcgcttcgacctggtgttcgaacccaatgtgcgcggggtattcaactgcatgaagtacgaggccaaagtcatgctcgaacagggttttggcagcatcatcaacaatgcatccatgggcggcgtgatcggtttcgacacggcggcgctgtacatcggcaccaagcatgcggtggtcggcatgacaaaaaccgcgtccatcgaatggttcaagcagggcgtacgggtcaacgcgctgtgcccggggctgattgaaaccccgttccaccatcgcgggatctggccttcggtggaagcccagcaggcgtttgccgctaacacgccagccagccgttttggcacggctgaagagatggccaccgtggtggccttcctcggctcggaagattcgagctacgtgtcgggccacgccctgttggccgatggcggttactcggtggcctgacggttggaggcttgaaagaagtcgataaatgcccggagctttccgggcatttgcgcacggttggcgtaatacagatggaaggtttcagcgggcgctgcgtactgttccagcagcgcaaccaactggccgctggcgatttgtttttcggcaaacggtcggaaaaccatggccaggccacagcccaattgcgccgccgacaaggtggtgcgcatttcatccagcaccaggcgccctttcacctcgatctcgacattggccttgccgatgcgaaaggtccagtccatgaacggcccgcggctgctcaggcgctggcggatgcagtcgtgttccagcaagtcttcgggcgtattcaagggcgctgattgcgccagatactgcggtgtgccgaccaccaccatcggctgtgacgcgcccagcggtacggcgatcatgtcgcgctgcaaggcctggcccaggcgaacaccggcgtcaaagccctcgccgatgatgtcgttcaggccattgtcgagggagatatccagcgtgatgtccgggtagtgcgcgagaaaggccggcacatgcggctcgatcagcgaggcataggcgacgtacgagctgttgattttcagcgcgccgtagggccgcgtggcggtgtcgtggacctgctgcaccgagaagcggatctgctccaacgccggcgccagggtgtcaagtaactggctgccggactcggtcaaggccacgctgcgggtggtgcggttgaacaggcgcacgcccagttgcgcctccagttgcttgatggttttggacatggcggtgggcgtgacttcaagctcggctgccgcccgtgcaaaattcatgtgccgcgccacacattcaaaggcgatcagcgcgggcaggtgcacggggcgagcgccggggatggcctcgggcagcgtggttttcatgctcatggggcgtctcgactaaagtgttcacaccgatacacaagcataaattagttcaactaacccgcgcattaaaaataccgcccacgaaaaaatccgccgcagagcctgcggcggcaaaccaaaggtttttgtcgaagcagagcggctaagacaggaacaacgctacgcctgccggcgattaaacaatgtgaagtttaattaatcgagtttaatcagtttcatcgctgcagcccgcgcgaactgtgcttagaatcagcttcggcaaacacgccgaacacaataaaaatggcaacgcctcacttcaaaccctgcccataaaacctaatgcattgtccaaataaagtgcggtgtttctgtgcgcgcgttaattattccggggaagtaaaaacatgaacaaacagttgagcctgttaacactggcactgtgcgccggtatcagccaggtcgccctcgccgagtcggtgtccgaccaagccgattccaaggggttcatcgaaggcagcagcatcaccggcctgctgcgcaattattacttcgaccgcgaccgccaaagcggcaaggccgacaaccgcgactggacccagggcgcgatgctcaactacgcctcgggcttcacccaaggcaccatcgggtttggcgtggacgcctacgcctacggcgccatgaagctcgacgcgacccacgaagacaacaacaccggcaacctgccgaccgaccgcaatggcgaccccaaagacggctacggctcagtgggcgctgcggtgaaaatcaagatttccaagacccagctgaaattcggtgacatgcagcccaccgcgccggtcttcgccaccggcggcacgcgcattctgccgcagaccgcgacgggctttgacctgaccagcagcgaaattgccgggctggacctggaagccgggcatttcaccagcaccaacagtggcatgaccagcaaccacgaccacgatatctacgcgacctacgccaacgtggccgccaacagcgccagtttcatcggcggcaaatacaccttcaccccgtccctgagtgcaacggtgtatgcgggcgagctggaagacatctggcgtcagtactacaccaacctcaactatgtgttgccgctgggtcatgaccagtcgctggcgctggacggcaacctgtaccgcacgctcgacaccggcagcgccaaggccggtgcgatcaacaacaccacgtactcgttggcggccgcctattcgttcctgcaggcccatacgctgacgctgtcgttccagaaagtgcacggcgacacgccgttcgactacatcggcaccgggagcaacggcgcgggtgaaggtggcgactcggtgttcctggccaactcgatccagtggggtgacttcaacggcccgggcgagcagtcctggggcattcggtatgacctgaacatggccagcttcggcgtgccgggcctgagcttcatgacccgctacgtcaacggctcgggcatcgatggcacgcacaccccggccaacagcgcgtatgtgggtgactacggtgccaacggcgaccaccacgagaccgatgtggaagccaagtacgtgctgcaaagcggcccggcgaaaaacctgtcgtttcgcgtgcgcgacgccatggtttcgtcgaatgccgaccagcgtgacggcaagctcaatgagctgcggttgatcgtcgactatccgttcactctgctgtaacggaccccagccgctggcgcattcccgcgctggcggctggaccggcctgcaacctgcagcggtccagcgttaccacctcgccctcagcgttggccagcatcggctccaccgtgcagccagtctggtgatcgaccagctcgacgctggtgccctcctcggcaaaatgccgattgccaaacgcaaccaacgccatcagcaccatacgaaaatcctcgcccctggccgtcggcacgtattcgtaacgcggcggccgcttgctgtacggcctgcgctccagcatgcccgcctccatcagcgcgttcaggcgccgtgtcaacatgttcggcgcgatgcccaggctgcgggaaaactcatcgaagcggcgcaagccctgcaacgcgtcgcgcatgatcaacatgctccaccattcgccgacccgttcgaggctgcgggcgatggggcattcgtcgctggtaagggatttgcgctgcatggggattcccgtgggtgattacacagttgtgtgatgccatgttactttcatgatgatagtgacgtccacaggtgtgtatccctcaacgcaacaggagtcgattgatcatgagtaaacgtattgtcgtgacaggcatgggcgcgttgacgccactcggagcgaacgtcgaagccacctggcaacgcctgttgaacgggcaatcaggcatccggcgcttgccagaagcattgatcggcgatctggccgtgagcatcggcggccaggtgcagagcgtggagcaggacgctgaagccggtttcgacccggaccgtctgttggccgccaaggagcagcgcaagatggaccgtttcattctgttcgccctggcggcggcggatgaagcgttgaagcaagccggctgggcgccgaaatctcttgaagaacaggaacgcaccgcgacgatcatcgcatcgggcgtcggcgggtttccggccatcgccgaagccgtgcgcaccaccgacagcaaaggcccgcggcgtctttctccgttcaccatcccgtcatttctgagcaacatggcggccgggcatgtgtcgatcaactacggtttgaaaggcccgttgggcgcgccggtcactgcctgtgcggccggcgtgcaggcaattggtgacgcggcgcggatgattcgcgccggagaagtcgacgtggccgtgtgcggcggtgccgaagcagcgattcaccgggtcagcctcgccgggtttgcggcggcgcgggcgctgtccagtgacttcaacgaaacaccggagctcgcttcacggcctttcgatcaggcccgcgacgggttcgtgatgggcgaaggcgcgggcattttggtgattgaagagctggaacacgccctggcccgtggcgcgcagccgattgccgagttggtcggttatggcacgagcgccgatgcctaccacatgaccgccggccctgaagatggcgacggcgcacgcagggccatggttcaggcgttgcgtcaggcggggatcaaagcatcgcaggtgcagcacctgaacgctcatgccacctctacgcccgtgggtgacaagggcgaactggcggcgatcaggacagtctttggaaccggtggcactccggcgatcagctcgaccaaatccgcgacaggccatctgctcggcgcagcgggcggcattgaagcgatcttcaccgtgcttgccctgcgtgatcaggttgcgcccgccacgctgaatctggaaaacccggacgccctggccgatggtttggacatggtgcgcggtgaagcgcggcatttgccgattgaatacgcattgtccaatggcttcggctttggcggggtgaatgccagcgtgctgttcaagcgctggccataaccggcggtttgcccctgcgggcattttcggggaccatgagcgcctttctgttcctgccaacaagaggcgcccatggccaaccacgacctgtccttcactcccgatcccgacgcagactccatttcttccgacgtcatcggcttcaacggcatcctggtttccacccaagtcccgacccgcgccgacggcagcctggagctgggcgatatcaccctgcaaagcgaatgcaccctgcaagcgctgaaagtcgcgctggaaaaagccggcagctccatggaccgggtcatgcacctgaccatctacctgaccgacatggctgaccgtgcggcgttcaacgaagtctacaagcgcttcttcgccaaaccatggccggttcgcgccgccgtaggcgtagctgcactggccgtcgaaggcatgcgcgtggaagtcaccgcgatggccgccaaagcctgagttcgcacctgcaacaccgttcaaatgtgggagttggctgccaacagagatgttgcctgacccaccgccatcgcagcctcgctgaagctcgacagctcccacagggaaccgggtccatcctttgaagtgcggtcaaaggtgggagctggcttgcctgcgaaggcggcggcactaccaacacagatgtcgcctgacccaccgccatcgcagcctcgctaaagctcgacagctcccacagggaaccgggtccatccttttggaatgcggtcaaaggtgggagctggcttgcctgcgaaggcggcggcactgccaacagagatgtcgcctgacccaccgccatcgcagcctcgctaaagctcgacagctcccacagggaaccgggtccatcctttgaaatgcggtcaaaggtgggagctggcttgcctgcgaaggcggcggcactgccaacacagatgtcgcctgacccaccgccatcgcagcctcgctaaagctcgacagctcccacagggaaccgggtccatccttttggaatgcggtcaaaggtgggagctggcttgcctgcgaaggcggcggcactgccaacacagatgtcgcctgacccaccgccatcgcagcctcgctgaagctcgacagctcccacagggaaccgggtccatcctttggaatgcggcaaaaggtgggagctggcgtgcctgcgaagacggcggcactgccaacacagatgtcgcctgccccaccgccatcgcagcctcgctgaagctcgacagctcccacagggaaccgggtccatcctttgaagtgcggtcaaaggtgggagctggcttgcctgcgatgaaggcggcgcggtggttcaggaagaccgctgtgacgccatcgcaggcacgccagctcccccattgaatcggcttcgctctctcgcattgcgccagacagccctgcggtagatgccgctcaggcatttcacggctacaatgcgcgcctcaaccgtgacaagcctgactaaaaaaactatgtccttgcccaagcatcaccttgaattgctcagccctgcccgcgatgttgccatcgcgcgcgaggccatcctgcatggcgccgacgccatctacatcggcggcccaagcttcggcgcccgccataacgcctgcaatgaagtcagcgatatcgcgcaactggtggaattcgcgcgccgttaccacgcccgtgtcttcaccaccatcaacaccatcttgcatgacaacgagctggaacccgcgcgcaagctgatccatcagctgtatgacgccggcgttgatgccttgatcgtgcaagacctgggcgtgatggagctggatattccgcccatcgagctgcacgccagtacccagaccgacattcgcaccctggcccgcgccaagtttctcgaccaggccggtttctcgcagttggtgttggcccgtgagctgaacctgcaggaaatccgcgccatcgccgatgaaaccgacgccgccgtcgagttcttcatccacggcgccctgtgcgtggcgttctccgggcaatgcaacatttcccacgcgcaaaatggccgcagcgccaaccgtggcgattgctcccaggcgtgccgcctgccgtacaccttgaaagacgaccagggccgcgtcgtggcctttgaaaaacacctgctgtcgatgaaagacaacaaccagagcgccaacatccgcgccctggtcgaagccggtgtgcgttcgttcaagatcgaaggccgttacaaggacatgggctacgtgaagaacatcacggcctactaccgccagcgcctcgacgacgtgctcgaagaccgcccggatctggcccgcgcgtccagcggccgtaccgcgcatttcttcctgccggacccggaaaaaaccttccaccgtggcagcaccgactatttcgtcaccgaccgcaaggtcgacatcggcgccttcgacactccgacctttaccggtttgccggtgggggtggtggaaaaagccggcaagcgtgacttgcaggtggtcacccatgagccgctgtccaacggtgatggcctcaacgtgctggtcaagcgtgaagtcgtagggttccgcgccaacatcgccgagccaaagggcgaattcgaagaagacggcgagaaacgctaccgctaccgtgtcgagccgaatgaaatgccggccggcctgtaccagctgcgcccgaaccatccgctgaaccgcaacctggaccataactggcaacaggcgctgctcaagacctcgtccgagcgccgtatcggtttgtcctgggccgcacgtttgcgtgaagacgagctgcacgtcaccgccaccagcgaagaaggcatcagcgccagcgtcaccctgcccggcccattcggcgtggccaacaagccggaacaggctctggacaccctgcgcgacctgctcggccagctcggtaccaccgagtaccacgccaccgatatcaagctcgacgcgccgcaagcattcttcgttccgaactcgcagctcaaggccttgcgccgcgaagtgatcgaggcactgaccgccgcccgcgtcgcggctcacccgcgtggcgggcgtaaggccgagaccacgccgccaccggtgtacccggaggcgcacctgtcgttcctggccaacgtttacaaccaaaaggcgcgcgacttctaccaccgtcacggcgtgaagctgatcgatgcggccttcgaagcccacgaagaaaccggcgaagtgccggtgatgatcaccaagcactgcctgcgtttctcgttcaacctgtgcccgaaacaggccaagggtgtgacgggcgtgaagaccaaagtggcgccgatgcagttgatccacggcgacgaagtgctgaccctgaagttcgactgcaaaccctgcgaaatgcacgtggtgggcaagatcaaggggcatatccttggcttgccgcaaccgggcagcgtggtcggttacatcagcccggatgacctgctcaagaccattccgcgcgcaccgcactgacctcctgccgtttgcgcaccgagaggcaccacagcggaaacggcaaggtcaccagcagcagcaaccagagcaaggcgtagacactgtctacgccttcgttttgcaggttgacgaacagctttaccggtatgccctgcggaaagtaggcaaacaccatcacgattccgaactcgccgataacccgcacccagacaatcgccagcgcgttggccagggcgcgtcgggtgaccggcaaggtcacgcgccggaacacctcagcgggcttacaacccaggcttcgcgcggcgtcttcaaccgaacgcggcaccgattcgaaggcggtgcgtgcgcacaggatgtaatacgccaagccgccataaagctgcgcgaggataaacgccggcaggttgttgttcagggtgacgcccaaatagccgagcgcttcgcccaaggtggcgtagggcccgtaggcggtgaccagcaaaatgcccatcgccagcggcggtgtcagcaaagagaccaaaagcagcgcctgcaaagcgccgcgccaggccgattggctgcgcgcgagccacagggccaacggcgtgccgagcagcacgatcaacagcgccgacacactgctcaaccccaacgacaccgccaccgccgtgccatcgccataagccaggtgcagatgcgcccatgaagtggcatccaccagcgccacgaaaggaactgccaacaggatcgtcgccggcacgcccagccacagcgctcggctcaaagtaccccgcctttcggctgaccataaccattggcttggaacagcttctggccgtccgccgattgcaggaacttcacaaagtcctcagcctgttgtgggtgcgtggcgtttttcagcaccactgcgtagaacaccagcggctgtggtttaagggtttgcggctggccgtttttgtccggcagttgcagatcaaccgtgtcataccagtcttttgcgaaggccggattgctcaggttgatttcatccggcagcgccacatagggcagcctggcggaaatcgttgcgctctcgtagccggaggcggcatcgatttgcccggcttgcaggcgggtcagcaaaccgccttcgccgaagacctgctgcgggttttgcacgtcaccgaggatgtgttgagccaggcccggttgcccgtagtatttttccgccagtttcatcgtgaacacgatgttctgcccttggggatcggtgcccgcatccgtgcgcccaaacctcaggccgggtgtttgcagcacctgccaccaggtaccgctggccagttgcggcgcaaagcggcttttagggttgtaggcgatgaccatccgcgtgctggcgaccgggatcgcgtgatcggccaggccggccttttgcagaatctcgatcggccccggcgtgatggaaacgaacacatccgcctgcaacttcttcgacgccagcaggcgcgccagcccgtaggcgccctcgccctgcccctgatacgtgagcttttcacgctcggcaaacgccgggcccagcgccttgtccatcaccacgcccatggagccggcgtaggtcacatggatttgcccctcggcctgtgccgacaacgcgctgcttaacagcaggctaccgagtagccatcccctggttttgctcagcatcagctcgctcgctataacaatttatatatagcgttgaatagtagcgaagctgtcgcgggcgcttcatgaaacctgttgcagcgcggctttggagcgccaccaccagccacgctgcaagcctgccgccgccagcaagatcgccgccacgcccaaccattgcaaccagcccaggcggtggccgaaggcaaaccagtcgacgaaaatggcggcgatggggtagataaatgacagcgcgccagtgatggccgtcggcaatttctggatcgcgccgtacagcaatacatacatcaaaccggtgtgcaccacgccgagggcaaccagtgccgcccaggcatctgtcgaggccggaaggctgccccagggcaccagcggcgccagcaatactgcgccggtcgccacttgaatcaatgccatcaaatgcggtggcacctcttttaaacgcttgatgatcagcgcggcaatcgcgtacaaaaaggctgcgcccaacgccagcgcgatccccgccaggtaatcgttgccaccgctttgctcttcgccgtgcgccgtcacaatggccaacatgcccaggaacgccacgctcagccaggcgattttctgcacggtgatcttctcgccaagaaacaccgccgccagcaacaccaacatgaacggctgcacgttatacaccgccgtgctgatggcaatcgacgcgtgggaataggattcaaacagcaacaaccaattgccgacgatggccacgccgctgagcatcgccaggccgaatgtggcccaggtgagagagcccagccgcaggtaaccgagcaaggcgcacaccaacagcagcgtcagcccaccgatcacgcagcgccagaacaccacttcgatcaccgacacacccgagaccagaacaaaccagccgatggtgcccgagatcagcatggcagcaaccatttcccacgacccgcgacggatagatgtgtccacgattaatgctcctcaagtgaggcccaattatggcaacctgcccggcagcggttccagccgctaaaaaaggcaaaacccggcattcaccttttctaattaggtgcacagcatgattgacactatcgaccagcaactgattgccgccttgatggacgactcgcggctgtccctcaaggccttggccggcatcaccgggctgtcctcgcccagtgtcggcgaacgcctgcgccgccttgaagaacggggggtgctgacccactacaccgtcgacatcgacgccaaacacttcggctatctgctgcaagctatcgtgcgcatccgcccgttgcccggcaaattgcaggaagtggagcggcagatccaggcgatcccgcagttcaccgagtgcgacaaagtcaccggtgatgactgcttcatcgcgcgcttgcacgtgcgcaccatggaacagctggacaccctgctcgaccgcctgaatgtctatgccgaaaccaacaccgccatcgtcaagaaaaccccggtgaagcggcgtttgccgccgttggcggatgagtgatcggcaaggctagttacgcccggctgtcacgccaccgtctacaggcaacaccgtgccggtaatccacgacgcctccgtcgaggccaggaatagaatcgcctgggcgatatccgctggctggccattgcgccccagtgggtggaaggcattgaacgtgggcagcacttccctgacttggctcggctccatgaacgtcccgtacaccggcgtctcgaccaccgcaggcgccacggtattgatacggatgttcgaggcggccagttcgatggcgaggttgcgcgtcagggcgtggacaccggcgttggctgccgaataagcggctgacggcgttgcaccgatggcctggatcgcccacagcgagccggtctggacaatggcaccgccgccgcgctggagcatggctttggcggccgcctgggccatgaagaatttgcccttgaggatggtgtcgaggaaccagtcgtattcttcggcattcacgtccaaaaaggctttaggacggaacacgccggcattgttcaccagaatgtcgacaccgccgaatgccttgaccgcttcgtccaccaaggcctgggcggtcgccggtttggcgatatcgccggccagtgcacggatgtgcgtgccgctcgggtcgattgcttgggcgacttcgcgcagttttgccgcgtcacggccgccgatgacgacgcgggcgccctcttccacgaagcggcgcgccacctctttgccgatacctgaactgccgccggtgacgatcacaacctttgaagaaaatctttgcatggcatctacgctccgagtgggttttaccagccacgctggctggaatgcttgctattcttcgtgtcagctgcgctggcgacaaaccagatcttgtttcccacccttaaagattttctttaaatgaattcacttggttacctgaacgcgctgcgcgccttcgaagccgctgcccgtcatcacagtttctccgccgccgccgaggaactgaacgtcacctcggcggcggttggccaacaagtgcgcgccctggaatcctggctgggagtgccgctgttcacacgggccagcagcggcactacgcgcctggtcatgacagacgtcgcccgcagtgcgttgccggatattcgggaagggtttgatcgactgcgcgtaggcctggcgcgaatgaaagcagcgtcgctgagttgcgacctgacggtgacggtcagcccggcgtttgccggcaaatggttgctgccacgccttgagcgcttccagcaggctcacccgcagcttgatgtactgctcaacaccaacctcaagcccctggactttctcgccgagcacatcgatatcggtgtgcgttacggcgcggggcattggccggggctgaccgctgtaaaactgatggatgaggacgtgtttccggtgtgttcaccgcacctggccgggctgcaccagggcgagcttgccctggaacagttggccggttgcacgttgattcatgatctgtcgatggccgcagacccgggcttcccctcgtggcgcacctggctggacgccgtagggcaaccggatacggatgccagccacgggctgcggatcaataattcggcggctgtcgtgcaggcggcgattgagggccagggcattgcgttggggcgcagcgtgatggtgcgcgatgacttggcttcagggcgcttgatccgcccgtttggcccgctcaaaagcgcattggcgctcgcgtattacgcggtgtaccgccccgagtgcgaagggttggccaaagtccaggcgtttcgggactggcttttggagcaagcgcgccagtagtgtcagtcatgcagtgccttggccgctgcgagcaaaccctggaatttgcgataccgcgcttgcagccccggctgttgcgtggcatccggcaagtagcgcgccttgaccggcatgcccgccgccagtaagcccgcgccctgcccgatcgacagaaaccccagctttgcggcgccaatgcacgcgcttaactcactgccgtgcagcgtgaaaatctcgcgctgcagaatgttcgccagcaactgcgcccagtagtcgctgcgcgcgccaccgcccaccaacgcgcaagcccccacgcttgcaccagcagactgcaccgcgcgcaaggcatccagcaacccaaaaccgaccccctccatcaccgcataaccgagcatggccggcgtgcagtcatggcccaggctcataaacccgccacgcagcaaggggtcgttgtggggcgtgcgctccccggcgaggtagggcagaaacaacggcgtgtccaacggcacggggcggtctatcggcagttgcgcctgtacctggttcaacaacgtctgctcgtccggtgtgccggtcaaacgtgtgacccaacgcaagcagctcgcgccggcgagcatggcgcccatggtgtaccagcggtctggcagcgcatggcaaaaactgtgcacggcgctggccgggttgccggcggcgtggtcggtgaccgcgacaatcgcggcgctggtgccgagggtgataaaaccgtcgcccgcgttgatcgcgccgatgccgacggcggcgaccggattatcgcccccgccgccggcaatgacgacttcgggcgacaaacccaaaccggtcgcggttaaccgagcacttgccgcgccgccctccaccagcgtcggcatttgcgccggcgccaggcccgtggcccgcaccatcggcgtaaaccattcacgccgcgccacatccagccacaacgtgccggcggcgtccgacatctcgctgatgcgctcgccactcaagcgcaggcgcaggtaatccttgggcgacagcacgcaatcaatcgcgttgaacacctcgggctcatgctgttgcagccacagcagtttcggcgcggtcagcccggccatgggcaggctgccggtgacgtcggcaaagccgggcccgagctgctcggcttcggcgacagcgcgggaatcgtcccacaggatcgccgggtacaacacgcggttgtcatcgccgagcaataccgcgccgtgcatctgccccgacaggccgatgcacgccacacggctgaaagcgtcgtgggcacgcagcacgtgcagcgcctgcaaacaggcttgccaccagtcttggggggcttgctcggaccagccgctgtggcgccgcgaaacgctcaagcgtacgcccgtgtgggccagcacggcgccgtcggcgtccatcaggatcgccttgagttcagaggtgccgaggtcaatgccaagggaaacaggacggctcatacgcgtgtcattccagtcagatacagccacatgaattacgcacttgcagggccggcgcgagccgcacgctttgcgtcggcgcgcccggcgtggccatgcgttgcaacaacagatgcacagcgcgcgcgcccagcgccttgaccggctgggcgatcagtgtcaggcgcggcacaaaaaaatcggcccagtcaaagtcgtcaaaacccaccagggccatctgccccggcacctcgatttgcgcatcgcgcagggcgtgcatggcgcccagtgtcatcaggttattaccggccatgattgccgtcgggggcaccgtcagggccagcagttgcgcggttgcagcgcgagccggctcactgttggagccgccattgaccagcaattgcgggtcaaaccccagccctgccgcctgtaaagcggcgcgataacccgctacgcgctcgtccgtggttcccagccccgcacgcccggcgataaagccgatacgccggtgcccgtgttcaatcaaatgcgtgactaacgcctgggtggactgggtgttctccaccccgacctgatcaaaccgttcactcatcatgcggtccaccagcaccgtcggcatttcattggcctgcaaatactccagcgccaacgagccggtggacggcgccagcaaaattccatcaacgcgccggtgatgcagcgccgtgaccacgcgcagctcctgctccgggtcgtcatgggtgtcgacaaacagcatcatgtaaccgtgcttggcgcactcggtttcaatcgcgtgcaccgtctcgctgaagtaatggttggacagcgccgaaatcgccacgccaatggtgttggtgctggaacgggccagcgagcgcgccagggtattggggatgtaacccagtgcctgaatcgcttgctgcaccgcctgcacagtggccgggctgactttgcgggtgccgttcaacacatgggacaccgtcgacgtcgacactcccgcccggcttgccacgtcatccatggtgaccacagcgctgctctcctttcagtggatcaatgtttgctcgaccagccgctgtacgacccgacgttgtcacgggtgatcagttttggcgtgagcagggttaccgcgtcggccggggccttgtcattgagaatgtcattgcccacgtttaccgcggtctgggccatggcccacgggtcctggctggcggacgcctggatctgggtatcggttttcagtgcgttctcgatgtccggcgcgccgtccacagaagtgatgaggatgccactgcgtttaagctgcttggccgccaggtcgctgccgatggcttgcgggtcgttgaccgcgaacaggccgtcgattttcgggaagcgcgtgaggtaaccctgcatcacgttcaaaccgccttcgcgcgagcctttgccgtcctggtcatcggacagcaccttgatgtccggcgcagcggccaatgccgccttgcagcctttgacacggtcgatcacggccgtcacttgcgggccgttctggatgatcacattgcccttgcccgagagcttgtccaccaggaactggcaagccagcttgccagcttcgacgttgtcggtttgcaccgtggcgttcacgcctttggcgtccacatccaccgccaccacgacgataccggcgtcgcgggctttcttgatcgccgaggccatggcggacgggtcaaccgcgttgagcaggatcaggtcgaccttggacgagatgaagttgtcgatctgcgaaaactgcttgctcaggtcatagtccgccgacaccgacgtcaccttgacgttggggttcagctccttggcccgcgccgtggcgccgtcggccagggtcacgaaatacgggttgcccagcgagcccatgctgatgccgagggctttgagttcacgggcttggacggcttgggacatcagggcagccaaggcaataacgggaaacaggcgtttgacgttcatgcaggtctctcttgtgattgttgtgtgagtgaaatcaggtccgtgcaccggactggcgatagcgatccagcgccaccgcgccaatgatcacgatgcccttgatgatgtactgccagatatcggagacccccagcagcaccaggccgttggtgagtaccgcgatgatcagcgcgccgatcagcgtgccgccgatggtgccgacgccgccggtaaaactggtgccaccgaggatcaccgcagcaatcgcatccagctcataggactgcccgagctgcaggccattggcagcaaacaggcgtgacgcgctcatcaccgcgccgagcccggccagtgcgccggacatggcgtagacgaacagcagtactttccacaccttgatccccgatagccgcgccgcttccgggttaccgcccaccgaatagatctgcacgcccatcacggtgcggcgcaggatgaaccacgacagcaccaccacggccacggcgatgatcaccagccagggcacgccgagcactgagtcattgccgataaacgcaaacggcaggtccgggttgaatacggttttgtcatcggccagcaaacgcgccaaaccgcgcatggcggtgagtgcgccaagggtgacgataaacggcggcaggcgcatgaaggcgatcaggccgccgttgaccaggccgagcagcaggccaaaaccgataccggcggcaatcccgaacatgccgaactgcggcgacatcgaggcttgcagggccaccaccgccgacgcggccagaatcgcccccaccgacaggtcgatgcccgccgtgagaatcacaaaggtcatgcccgccgccagcaccacgttgaccgaggcttgctgggtgatgatcgacaggttctgcaccgtcaggaaattctcgctggccagcgcaaagcccaccagcagcaagaccagcaccggcagcatgccgaccgtgcgcatcagctcgcgaacccgctgtgccttacccgttgttgccacattcaactcagccattggcagccacctgatcgccaccggtggcgaggtcaataatacgttcctgggaaatggcgtggccggaagccccgccgacttcggccaccaactggccctcgcgcatgatcaacacgcggtcgcatgtgccgatgatttccggcagttcgctggagatcaccacaatgccgacaccggccagcgcgagttgattgatgatgcggtaaatctcggatttggagccgatgtccacgccgcgcgtgggttcgtcgaggatcagcacgtggggcttgacctccagcaggcgggccagcagcactttctgttggttgccgccggacaaggcaccgacattgaccttgcccgacgccacgcgaatcgacagcgacttgatcgcatcgttggagcgctgcgcggcatggccacggtccagcacaccgcccgcatgggcatcgggcacacaggcgcagacgttgatgttgtcggccacgctcatgtcgaggaacaggccctgggccttgcggtcctcggtgaggtacaccacgcccgcgcgaatcgcgtcagccggggtgcgcagttgggtgacggtcttgccgaccacttcgagggtgccgctggtgcgcgggtcggcggcaaaaatcagccgcgcaagctccgtgcgcccggccccgaccagcccggcaatgcccagcacttcaccggcatgcaggtcgaaactgcaattgtgcacgcgcttgccatcggccatgtcgcgcacacgcatcaccacgtctccggggttgtaggcggcgtgttctttcttgtagaaaccggagaggtcgcggccgaccatcatcttcaccagcacctcggccgacagcgcatcgcgggtcagttcgccgatgtactggccgtcgcgcagcaccgacacgcggtccgacagctcatagatttccgccatgcgatggctgatatagatgatcgccaggccctggccgcgcagttgtttgatcagcgcgaacaggcggtccgtctcgcgcgatgacagcggcgtggtgggctcgtccatcaccaggattttcgcgtggccatgcagggcacgggcgatttcgaccagttggcgctcggcaatcgacaggctgctgacaagtgtcgacggtttgaattcggcgcccaggcgctgcaacacttccacgcaaccggcttgcatgcctttgcggtcgatggtccagccgcgccgcagttcacggcccaagtagatattctcggccacgctcaggttcgggcacaggctcagttcctgatagatcacggcgataccaagggctttggcggtggcagggtcaaacgtggtgacggcttggccgctgatgcggatttcaccgccgggatcggcctggtacgcgccggagaggattttcatcaaggtcgatttaccggcgccgttttcccccatcaaggcgtggatttcaccggggtagaccttcaggccgacatttttgagcacgcgcaaaccattgaaggttttgctgatgccctgcatctcaagcaagggttcaaggctcatggatgagctcctggaattattatttttgtaatcgagtgctgccgactctaagccagatgcattttgctgcgcaagcgcttgcgtcgaccgtttatcgatgggttaaacgtttcaccaagcgcaaatgtccgaaacctgccgattgtgcccgcagatgaaatgaattttaaaagtcagcggaataaaacggtccgccaggccgtttctcctgcattcactggaagccatcaggatgcgtcatgacctcaccctcaagcgttgtcgtttacatctggtatccccatggcgcggatgtcggccatgccgcgatgtacatcggcgaccccgtgatcggcaaaatgatcgaagtgcgctatgaccgttatcgcaacgaaggcgaacgtgatcgcgaccgggcttttatcgagcaatacaacaccgcgtatgtgagctggtggccggagggccgagccgccatgaccggcaagcagccgcaggagcgcaacttgttcctggagtcggacatccgtgcagaaggctgtaaaccccatgtggtctacacgattaccgggctgaacatgcaggcgatgcaggctgagtggtacaacatccgcagcaagcccaacgccaattaccagatgttgcgcaagagctgctcgaccatcgtgctgcgcgtgctcaaggccggtggcgcgatggaagaactgccgttgatcaagcgtgcctggttttccaacaacctgtatgtcaccccgaaaaacatcgcgcaggtctgcaacgaactgcgtgacaggggcctggcgaccaaagccaaaagcgcgctgtgcccggaaaaaggcgccttcatgttcggccttcgatagaggcgcaaagcgctataaccaaatcaaatagtgtgaataaacagatacgccttccacgttggcaggcgctggtgaatgatccgctgaaaattcctcccaccaccctgcaggtcgcaccatgagtacacagcaaaacttcaccttgctctttggccgtgcgttgctggtcgcgctgtttttattcagcgggatcggcaagttgatggcgcccgacgccaccatcagttacatcgcggcgtccggtgcccccttcccctccctcgcctatggcattgcgctgatcgtcgaattggggttggccaccgcgttgctgctgggttatcgcgtgcgcccggtggcgctgttgatggcggcatttaccttgctgaccgcgttgctgttccacaaccacttcggtgacaagggccagttgatcaacttcctgaagaacctggcgatcaccggcggttttctgcaaattgccgtgttcggcgcgggaacgttcagcctggaccaactgcgtgcgcagcgtacagccctgaactgacgcattcgattgagggctgaacgcttccggggggacgcgctcaaccctcaaaacgccataatctctgctattgtccaatcacctcatctcctcctcgtcgcctctgcgcgatcttctgtgagcatgctctgcgcctttgtctgttgacgatggcgggcctgaagttcacggatgtcttgcgatggatacacgctcaaccgaccaaccgcccgaggcgcaatcgcgggctgaaaaaatcgtcgaattcaaacgccagaaaaccctgctcaagaccggcgccctgcaagacgcgattttcaacagcgcctacttctccagcatcgccacggatgaaaaaggcgtgatccagatcttcaatgtcggcgccgaacgcatgctcggctactccgccgccgacgtggtgaaccgcatcacacccgccgacatttcagaccccgtagaactgatcactcgcgccgcagcccttagcgcggagctggacacgcccatcacgccgggcttcgaagcgctggtgttcaaggcctcgcgcggcatcgaagacatctacgaactgacctatatccgcaaggacggcagccggctgtcggcgatggtgtcggtgacagccttgcgcaaccgccatgacatgatcatcggctacttgctgatcggcaccgataacaccgcgcgcaaacaggaggaagccgagcgcaaaggcttcgagcgcgccctggaagaaaagaacctggagctggaacacgccagccacatgaagtcggaattcctcgccaccatgtcccatgagctgcgcacgccgctgaacgcggtgatcggtttttctgaggcgctcaaagacggcctggtcggcgacatgagcgacacccaacgcgaatacatcggcgacatcttcaccagcggtcaacacctgttgtcgttgatcaacgacattctcgacttgtccaaggtcgaggccggcatgatggagctggaactggagcccgcggagcttgccgggctgttggccaacagcttgttgatcgtgcgcgaaaaagccgccctgcaacgcattcagctcaagctcgactacgaagacgacgttggccgcctggaactggacctgcgcaagaccaagcaaatcgtctacaacttgctcgccaacgcggtgaagttcagtgcacacggcagccgcgtcacgctggccgtgcgcgaagttgaccgtgagcaggtcgggcggatcagcggtgattggcccacccacagttttgccttgcaacccggcacgcacctgcgctttctggaattaagcgtcagcgacaccggcatcggtatcgccgccagcgacatgggcaagctgttcaaggcgttcagccagatcgacagcagcctggcacgcaaattcgaaggcaccggcctcgggctggcgatggtcaagcaactcaccgacctgcatggcggcagcgttgcggtggccagtcgcgaaggccaaggcacgcggtttgtcgtgtggttgccgttgcgccgtgcagcggaggccccatggccgaaatcctgatcgtcgaagacaacgaagccaacatgcgcctggcgcgcttgttgctgctcaacgcggggcacaccgtgttgtgggccgccgatgccgaggccggcctgacccttgcacgcgacaaacagccggcgctgatcctgatggacattcaactgcccgacatggacggcctggcggctacccggttgctcaagcaagaccccgtcaccgcgcatatcccggtgatcgcgctcaccgcgatggccatgaaggaagaccgcgaaaaaacccggctggcgggctgtgatgcctacatcatcaaaccgctgcgctaccaagagctgtaccaggtcatcgacaccttgttgaacacgcacatcagccctctcgcatgagtcctctccatggccagccaacccgcaatgctgttgatcgttgatgacgaaccccaggttcgcaaactgctggaaaccctgctgcaacacgagggctaccagaccctgtgtgcgagcagcggcgaggaagccttgcaactagtggcgcaacagccaccggacctgattctgctggatatcatgatgccgggcatggacggctacgaagtcgccagccaactgaagaacgatgaaaacacggcgaacattccgatcatcatgctttcggcgctcagcgagcccggcgcgcgcgtcagcgggctggaaaccggcgccgaggaattcatcagcaaaccggtggagcgtgtggagttatggctgcgcgtgcgcaacctgctcaggctgaaggcgcgcggcgaccagttgaaaaaccacagcctgatgctggagcagcaactgcaacgacagaccggcgcagtggccggcatgaacgtgcatgacttggcccgccaggacctggaaacggccctgcgcctggccgtgcaacagggtgacttcaccgtgcattaccagcccaagattgaactcgcgaacggccagatctgtgcccttgaggccttgctgcgctgggagcgcccgggctatggcgcagtgtctcccgccgtgttcgtgccggtgctggagagcctggggctcattgtcgaggtgggccgctgggtcatcgacaccgtgtgccagcagattgccgagtggcagcgcggtgcaatcggtgccgttgaagtctcggtgaacgtttccggccatcaattgatcgagggcgacctgatctcggatatttcgcgcatcctcgcgcagaccggggtggaaccccattggctggaggttgagctgaccgaaagttcgctgatggaaaacacccaacacaccatcgccagcttgcagcggctgcacgccatgggcgtgaaaatctccatcgacgacttcggcaccggctattcgagcctggcctacctgcggcgttttccgatcgacacgctgaaaatcgatatcgcgtttatccgcgaagtcaccagcaacccccaggacgcggcgatcacccgcaccatcatcgagctggcccacagcctcaagctgcgcgcggtggccgaaggcgtcgaaacccaggcgcagctggcgtttttgaaggacgccggctgcgatcagatccagggctatctgttcagccgccccttgcccgtggacaccctggaacgtttgttactggagcgtttgcaagggctgtgagatgtcctcgcgcagacactcgatcaacccctgatgggtcgcgctcaaccggtttgtgccgctgaccagcgccagttccgagggcggcaccggcggcaactccatgcagatacggtggcttggcagcacagcacttttgggcaggatactgatgcccaggccggaggtgaccgccgcctgaatgcccgtgaggctatggctgccaaacgccacgcgccaactgcgccgagccttgtccagcgtacgaatggcgcgctgacggtagatgcagccctgggggaacaacgccaatggcagggtttccacgcctagatcctggtgttcaccacacacccacaccaacggctccggccaactggcatggcattcgccgctgccggcttcgcgcttgatcagggcaatgtcgatctcgccgctttccagctgccgccgcaggtcggtgctcatgccactgaccgtttccagccgcgcttcaggccgggcgcgcacgaacccggacagcatggaggccatgcgggttgcgtcgaaatcctccggcacgcccaggcgcacaggcaccacgctggcctcattgttcaaggcatcgcgcgcttcccgggacaggttcagcaggcggcgcgcgtagtgggtcagcagttcgccgtgttcggtggggctgacctgctggccggagcgatcacgtaccagcaacacctggcccacgctctcttcgagcttgcgaatctgttggctcacggtggattgggtgcggtgcacacgctcggcagcgcgggtgaagctgccttcgtccaccacgcagaccagggtttgcagcagttcaagatcaaacatggtggcggccttcttatcgacaaatcaactgtacaaaagagattaatttaatttccaactaacagccaggcttcctatgctctctgtgtcgcccactattgcctgcaggtgccccatgtcgcttgataactcccctcgcccgctgtggctgaccttcgattgctacggcacgctgatccaatgggacgaaggcctgcgcgcagccgtggaccgcattcttggagaaaaaggcgagcatcaggtggaccgcgaaaccctgatcagcgtctacgaccaccacgaacacgcgctggaacaaaccccgccccatcgcagctttcgcaccctggccggtttaggcttgcaacaggcgctgaaagaactcggcctgccggccgacgaacacgacgctgcgatcctgacggacagcatcagcgccatgccaccgttccctgaagtggtcggcacgctccagcagttaaaggaaatgggttacaacctgtgcattgtctccaacaccgacgatgacgtgatcgccggcaatgtcgcgcaactgggcggccatatcgaccgggtgatcaccgcacaacaggccggggcctacaaacccgaccggcgcttgttcgatcatgcccatgagcaattgggcgtgagcctggatcaggtggtgcatatttgcgccagcccgcacctggatcatgcggcggcgcgggatatcggctttcgctgcgtgtggatcgaccggggtaccgggcgcccgttgctggcggattacacgccggatgcgattttggcgacgctggatgccgtgcctgggctgttcaagtcactgggttggtaggcctgacgcgcaatccaatgtggggcttgttgtggcgagggagcttgctcccgctggggtgcgcagcgcccctaaaaaaagcgggagcgctgcgcactccagcgggagcaagctccctcgccacaaacagcccgctcccacattgatccgcgttagcccagttattgcgtattggccttggccgcgtcgttgatgatcgccacgacccgagccgggttggacaccatcaccacgtgggacgcgcctttaacgtccacggtttccttggaccctgcccggtcggccatgaatttaagcgcggcctcgggaatatttttgtccgctgaaccgtatatgaagtaggacggcacagttttccacgccgggtcgccggacggctccttcagggcggcttcggtaatcgggcgttggcccacggccatcagttgcgcctccttggcgggcacgtcggcggcgaactggctgttgaacttgtcttgctggatatacaagtcagtcacgccgtctttggaaatgacaggcttgtccagggtcggccccagagtgccgcccggatagcggccggagagttcaaacgcggtctcgccttgttccggggcgaaggcggccacgtaaaccagcgccttgaccttgtctctgccatgcacagcgttggtgatcaccgaaccaccgtaggagtggccgaccagaaccaccgggcccggggtgtgctcaacgatgtcagcgacgtaatccgagtcggtcttcacgctgcgcagcgggttggccacggcgatgaccgggtagccttcggccttgaggccggcgatcacgccgttccagctggaggcgtcggcaaatgcgccgtgcaccagcaccacggtggctttttgtgggtcggcggcggctgaggtgattgcgcccagggccaatgcaccggtcatgagggcggcggcaatgcgggaaaacgtgaaagctttcatggaagtggctccgtcaggttagcgctcaaggcgttgaacgtggagccatgatgccgaagtggattttacaaatggaggctaatagtcgaggatatggcgcagatcgtctaaatagagcgtatttaatcagcaggtgattcatggatcgtttgtccacgttgctcgtgcacttcggcattggcgccgatacctttcacagcggcccgctgcagggcgccctcgacacgcgcgacctgcagcaacgcgggcgggtgtatgtgctcaaggaaggtcaagccagcctggaaatgcccggcggtgtgctggcgattcccgagcccagcctgatcctcgtgccccgccccctgccccatcggctggttgcgaaaaaggccgatggcgcacaggtggtggcggcctcgctgtgctttgatggcggcctggataatccgttgtcggtggcgctcactgattccattgtcatgccgctcaagcaagtcccgatgatcgccggtacgctggaatggctgttcagtgaagccttcgccgaacactgcgggcgcgaggcggtgatgaaccggctgttcgagttgatcgtgatccagtttctgcggcacatgatggcctatcacagcatgaccacgggcatgatgtcggggctggcggatttgcgcctggcgcgcgccatgaccttgctgcacaacaggcccgagcgcccgtggacggtgcaggaaatggctgtggaatcgaacatgtcccgcgccagttttgccgcacactttcacaaggtggtcggccagacgcccgccgattacgtgctcagctggcgcgtgagcctggcgcaaaagcgtttgcgcgaaggtcggcccatcgccttgattgccgacgaagtgggttatgaaagcccctcggcgctggcccgcgcattccggcgcaagatcggcaccagcccgcgcgagtggctgcagttgcaggcgccgctacgggtccagcacgccgccgctgtagctgtcggataggcgtgtgccggtgaatttggccaccacggcgccctgggcgaccagccgttcacggtggccggtgaccaggcggccggtttgggcggcgtgcaggatgacttccgaagcggggtcgccggggcgtccgataatccgcgcgaaacgctgcccttgctcgacgtgatcccccaggcctttttcgaacaccagcacaccggcgcacggtgcgaggatggtttccatgcagcccatgtccaccacgtcgccctgccacgcctcgatcacggccacttcatcgatcacgccattgacgcacagccacgcccacaggccatcggcgtcctgccgggccagcgcatcgcttacgtcggcctgcccgcgcagttcaatcgttgcagccagttgcggtgcggcgtgattgatgatggtttcttcaaaggagccatcgccgccttcgtcccacacaatcaccacctcggccttcaacgcggctgccagcgccaggccttgcccgggccagaaactgcggtggatatagaggtagggcaaggcttcgtcgtcggtgtgcaggtccagcaccaggtcggcatcggccgccaactgcaccaggcttttttgccattgcgcgaggttgctggcggggcgctccatggccagggaatggtcgaaggcgcggttgaaattctgcccggtggcttcgtggaaacgcccgagcagtttgccttggcgaaactggccgatgccgaacgggttggcttgcggcacgacggtcacgctgccgcgcagccggccctgatcctggcaggcctgcaggcgcggcagcagttggtgcagcaccagcatgccggcgatttcatccgcgtgcacaccggcttgcaggtgcaccgagggcccgctgccattgccttcaaagcgccacgcgccgatgtgcaacgggttgccggcgtcgccgggcacctgccacgaaaggtcttttgccatgccttgccctcctctcatcatttaatcgctagagattgaacacacgttcaattaacctgaccgtcccggttttccatcaaaggcattcccgtgagcaccgatcttcccaaactgcgccgcgccggcctcgacgagcgccgcgacctgctgattgccgccaccctcacctgcctcgcccgtgacgggcatgcggggatttccgtgcggcgcatcgcggccgaggccggggtgtccgtggggctgctcaaccatcacttcggcaccatcgatgccttgattgccgagacctatcacaagctggcggacgagttgaccacagcgctgtggcagcaggtcgaaagggccgaaggcgccgccgcgcgcctggatgcctttctcagcgcgtcgttttcgccaagggtcatggaccccgacctgctgggtgtgtgggtggtgttctggagcctgatccgccattcgccccacgtaaacaggtcccacgagaacagctaccgcgcctacctggccttgatccagcaactgctcgacgacctggcccgcagcgaaaacctcgttattcacgacagccacctggccgccatcggcctatcggcgatgctcgacgggctctggctcgaggggtgcctcaaccccggtacgttcagccccgccaacgggctgcatatctgccgctgctgggtacaagggctgcgtcacggagcattcggcgccgaccacgtcttgtgattcggggtggcgcgcgctgagcatcgccagcgtgccgctcacggcaatcagcaccgcgccaatgatcagggaggtgtccatccgcgtgccccagatcaggctcgacaagatgaacgcccagatcaacccggtgtattcgaacggcgccagcaacgtggcggtggcgcggcggaaactggcgaacaacaggaactgaccgatgccgccgaccaagccggccgccaacatgcccagccacgccggggttggcgccggggtgtaggtccagggcaaggtcaccgccatgcaaatcacaaacaccacgttggtgatcagcatctgctccagtaccgaggtggtcgggtcaacctggcgcagctggatataggtaaacgcccagcacagcgcggcggccagcgtcagcgcgatgggcaacgggtcgaccatgttactggggcgacaggcgatcaccacgccgacaaagccgatgatcaaggacacccactggccacggctggcgcgctccttgaggatcagtgccgcgagcaaggtcaccatgatcggtgcggagaaatacaaggtggtcatttccgccagggtcaggtctttggcggcggtgtaatacaacagccacgcgagcaacgacaacagcccgcgaatgatcagcagcttgcggctgaccgacgtccaggcgcggcgcaacaggcccatgcgcccggcgatcacacaggcaccgaccactaccaggctgcgccagaacaggatggtgaacaccgagtaatcggccaccagccatttgatcgccgcgtcctgcaaggccagaaacgcgtaggccagtgagcacagggcaatcccttgcagcgcgcggttctgtttcatccggccgacctgcgcagcggcgtgccgcgtcgttcggcaatcgcatagatgccttcaatcaggaacgtgaggcacaggtacacagcggccaccaacagcaacggctgatagatctgcaaggtttgcgcgcgcaccacgttggccgcgccgagcaggtcgaccacggcgatggtcgaggccagtgcggtggacttgagcagcatcaccgtctcccccgccagggttggcagcaacaggcgcatcgcccgcggcaaacgcacacgcaacaaggcctggcgcggcgtcatgccaaaggccgacgcggcctccatctcgcccttgggcaccgcgagcaagccgccgcgaatcacttcaccgacatacgcacccaccgacagcaccaaggcaaacacgatgtaccagtaaccatcgcgtaaaaacggccacacaacgctgccgcgaatcatcgggaactgcgcgaacaaactgcccaggccgtaatagaaaatgtagatctggatcagcagcggcgtgccgcgcaacacgctggtatacgccagtgcgcctcgggccagccacttgcgccgtgacaggcgtgccaacgccaccagcaccgccagggcaaagcccagcaccgccgaaatggccagcagcgacaaggtggtctgcagccctttggcgatcagcccggcgtagtaacttatccaatcaggcatgcgcccctcactcgacaaccggcatccagcgacgaatacgtcgctccaggcgcccggacaggtagttggaagccagcgtcaccaagtaatacaaggcggcggccgtgaggtagaacagcagatattgccgggtcgagcccgccgcctgcttggcggtgtacagcaactcgttggtgcccaccacgctgatcagcgcgctgtccttgatcaggttgatccacaggttcgacatacccgccagcgcgtacggcgccatgatcggcaacgtcacgcggcggaacaggccgaacccgcttaagccaaacgcgcgtgccgcttcaatctggccgtggggaatcgcgaggatcgccgcgcggaaaatctccgaggcatatgcgccctgcaccagccccaataccaggatcgccaccagcggcccgctgatattcacctgctcgaaccccagccacagcatcaacgcattgaggcccatggagcctgcgtaatacagcaacaggatcagcagcaattccggcactgcgcgaaacaccgtggtgtagccgcgcatcagcatcgcaatgggccgtggcgcactcagtttggcgcaagccaccaccaggccgatcagcaagcctaccgcgaaagagccggcggaaatttgcagggtcatccataaccctttgagcagcgcgttgccccacccttgttcgtcgaagcttaagagctcgagcattattcgctcttctgggcgatttgctggtaagggctgtcacaggtcttgctgacgaacgccggggtgtcgccacgtttgcaggggctgaccgacaggccaaagtagtgttgggacaggtcgtcgtagtctttgctcaccagcaactcgccgatggctttgtccaggcgggccttgagcgcggtgtcttccttgcgcagcccggcgccgacgccacggccgatgatcgggtcatacggcacgctggcaatgtgggccaggccgctggcttccggagtcttgaccatcatcgcgatggcggtgtcgtcggccatcatgtagtcgatacgcccggcaatcaggtcggcgttggccgactcctgagtgtcgtagtatttgagatcagcgatgttttcgtagtacttcttcaggtaattggcactgacggtggagatctgcacaccgatcaacttgcccttcaggccttcaggcgtaatgtccacggtggcgcccttggggcccgccacacccagcaacgagtcgtaataagcgcggctgaaggcgatctgtttttcacgctcgtcggtgaccgacatcgaggagaaaatcacgtcgatcttcttggccagcaacgacgggataatcccgtcccacgccacttccttgatctggcattcggctttcatgccctcgcagagtttgtggatcaggtccacttcaaaaccggaccactggccgttgccgccttttacggtgaacggtgggtagggttccgctgccactgcaaacacgatgggcttttccgccgcctgggtaaaacctgccaccaccatcaacactgcactgctcaaccacgttgccatgcgtttggatttcatgatgtgccccgtcttttttggaattagcgagtttgatgcgcgttgacgaactgtcggcaacgctcactgcgtgggtcgataaataccgagtccggcgtgccgctttcctcgatcatgccttggtgcaaaaacgccactttggacgacacatcccgcgcaaatgccatttcatgggtcaccaggatcatggtgcggccttcctcggccaacgagcggatcacccgcagtacttcgcccaccagctcagggtcgagcgccgaggtgggttcatcgaacagcatgactttggggcgcatggccagcgcgcgggcaatcgccacacgctgttgctggccaccggaaaggaacgccgggtattcgtcgcgcttggccgcaaggcccacgcggtcgagcaaggcttcggcgcgctcgatggcttcggcgcggctttcacgcagtacctgcgtgggggcttcgatgaggttctccagcacggtgcggtggggccacaggttgaagttctggaacaccatgcccagggtcgagcggatgcgcaccagttgcttggcgtccgccaccaatggcgcgccggggcggccgtagttgagcttgatgctttcaccgtcgacatgaatgctgccctggtcgggcacttcgagcatgttgatacagcgcaacagggtacttttgcccgagccgctggcgccaatcagtgaaatgacatcgccttcgtgggccgtcagggaaatgcccttgagcacttcgatattgccgaagcgtttgtgcaggtcgatgacttcgatcatcttcctggcttgcgccggttgcacggtttcgagtgtggccgccgccgcgacacggggctcgccggccagcttggcgacgaatgcggcgatgcgccggcaagcctcggccaagcgttcttcacccaaggtaaaggacaaccgcacaaacccctgggccggctcaccgaatgcggccgcatccagcacggataccccggcctcgcgaaacaaccgccaggcgaaatccagcgagcccaaaccggtgccacgcacgtccaccagcacaaacattcccgcctgcggtgcctgtactttaatgccttggcaggcgccgagccccgccaccaccaggtcacgtcggcggcgatagatttcgcgcatgcccaccgtcacttcatcatgggcgagcactgcggctgtggcggcttccatcacgaaaccgggcaagccatagagcatgctcagcaccagggtttcggcgtgcacgatcatttcgggcgcggcgacaatccagccgatccgccagccagtcattgcgtgggatttggacaagctgccaatgacaatgcaacgctcggccataccgggcaatgccgccaggctgtgatagtcaccgtcgaacaccaggctttcgtagacctcatccaccaccacccacaggttatgcgcgatggccaggtcggcgatggcttgcagctcttgccggttgagtaccacaccggtcgggttattcgggttggaaaagaaaatcgcccgggtgcgcggggtgatggctgcggcgagtaactcggcgtcgaggcgaaaaccggattccggcgaacacggcacgcgcaccagcgtcgcgccactggccttgagcgtggcttcataggtgacgtacatcgggtcgagcaccagcacttcatcaccggcttgtaacaggcacagcgagctgatgaacaaggcgttctgcgcgccgggcacgatgatgacgttgtcgggtgccagtggccgtgccagggttttgcggtagcgcgcggcaacggcatcgcgcagggaggggcggccgggaatttccgtgtagtgcgtgtcaccggcgtgcaaggcactgacggcagcgtcggtgatgaaggctggcgtggcgaagtcaggatcgccaacgctgaggatgatgatgtcttcgccctggcttgcggcatggaacgcggcgtggtggatgtcccaggcggcgacgccctgccctgcaattcgttcgacgaagggggaaaaccgcatgccagagcctctcgttcaagaagaaaaagcgcgagcccgctctcgtgaaagcgggtggatgcggtcaacatagttcaaactgaacagtcgttcaatggataagtttgagggggtgtcgtttatcgtccaaacaggtcgtgaatgaatttcagctgtcgcaaatctcgagtggggagccgggcttgtgtgggagctggcttgcctgcgatagcttcaccgtggtgtgactgataccccgcggtgcctgcatcgcaggcaagccagctcccacacagccagctcccacagttgatctcgtttcaaattggaatcaacgggacttcaagccaatcgtgccggcagcctggtcatacagcaccgcgttatcgaagtaggtgagcaagcccgcgttgatgccgtggaagttgcgcgggccctgggcggtgatgtagcgcacgtagcgcccgccgccattatcaaccttgaagtgctgccccaactggctgccatcggccatcgtcaggctgaaatgcgcaggcgtgcccaccggccaattgggctgcaaggcatcggcatagatatgaaaacccgccgcaccggtgtccagaatgctgtcgccgcacacctgctggtgagtgtccagacgctgcaggcaccctctcacgccatggtccttccagtacgcgccggcatccccgggcttcaccgggaactgctgcaggctgatggtgcgaaagccctgtgtttcggccgccgtagggttaaggatcaattgccccgtgctctgcccgggccgtggcagcaccaccagccagcgtgcgcccatggccgctaacgggttgggcgcgtcattgcgcaacatgcccacacccatgatcgccttgaagccttcgccccgttcggggttgccacccatgaggaagtccttcgggccgacctttgaagccgggcatttgggccgcgcgtcactgcaactgatgctgtccaccaattgcagcggcacttgcgccatggcattgcccaagctgacgctggccagcgccagcttgccgttcaaacgcacgccgctgccgtactgcaccccggcgggggtgttttgcgccacggcatcctggggtttcaaaaccccaggcaatacgcgcaaacctacggagccggtatcgaactgggtttccaccgaggtgctgccgattttcaaggtgacgctgtagcgcaggtcaccattggccatggtggcgctgtggatggggatgacttcacgggccgccgcatgggcgacaccggcacacaggaacagggaggccaacacagtcaagcgcatggagaaagtccgaatcaggttgagggagacttatagctggttcatcaagtcgcagcggtagtcctgcagttcacccgcagaaccaaggttcaggccggtcaatgacaagtgcgtggtcagcagcaccaggctgccgtctgcacgcggggtcatcagcaggccgtaattgctcatcacgtcggcttgggcatcgacgtactcgcgcaacacttccagggggtcgagcgcatcggcgtcggctgccgacaggatgcgggccgcgtacatatgccctttcaaacgggtcggcagcaggcgccactgttcatcaagggtattggcctgctgattgagggccgtgaagacgtccgggcgcaggcaagcgatgtgcacgtgcagttggttctcggagcggccataacgggaattgatcgccaccgaaacgaactgatccggaatcggccttttcaggccttcggacaggatgctgcggtgccgccaggcttgggcaaagtagtgcggcagcaaatgccggccaagggctgggtcttcgatgccgctgaccttgtccaccgggataagcaggtcatgcagcgggccgttctggtccttgaacaaggtgtagccacggtccaggtccaccgtcaggcacgggctgggattttgccgctgttgctggtcggggacgcattgctggctgacgatgtgccatagcgcgtcggggttgccccgccatttccaggctgcggccaacagcagcccacagagcaaaacaccactgattgtgaatacggcaccgcgcttcatgcaaaaacctcaacgtacagaaatgtcagttatttttatcgctgacatccctgtcgctagggttaacgttttgcaggcgccataaattccggcccgatcggatcttttatcgtgctggccaaaatacggtcgatatgggacaggtcatcggcgctcaggtgccagccaaatgcctcttcatagccttttaattgctccggccggcgcgcgccccacagggcaatcgtcgggccctggtccagcacccagcgcagggcgagcgccagcaccgacttgccgtggcactcgcgggcatacatgtccagcgctgccacggcggccaggtattgctcgaaacgtggtgccctgaacttggggtcgagcttgcgcacgtcatccccggcaaagctggtggccgaatgcatgctgccggtcaacaacccgcggcacagcgggccataggccaacaccaccagggagtgctgccgggcatacggcagaatgtcgctgtcgatggcccgctcgaacaggttgtaagggggttgcaccgtggccaaagccgtgtgggcgctgaattcgtccatctgggtactggagtaattgctcacccccacggcaaggatcttgccctcacggcgcaggcgctcaagggtttcggcggtttcttcctgggccaccagcgggtcgggccagtgaatctggtaaagatcgatgtaatcggtctcaaggcgcaccagggagtcttcgacttccttgcggatacgctgggccgtagcattgcgccgcgtggtgccgtcgtcccattgcaggccggccttggtcgcgatcaccgcactgtggcgaaccccgcgcagggccttgccgatcaactcttcggacaagcccaggccatagaccggcgcggtgtcgatcaagttgataccgcagttcaacgcatggcgaatggtcttgatcgactgttcgctgtccgccccgccccacaggtgcccgcccatggaccaggtaccgagggcaatccgcgaaaccgctttttgaataccggcaatccggatcgtctcgatactcataaaaaaagccctctgccgacactattgcttagaaaagcaattactctagatcatccgaggttgaatagggctcaacgccccatgcagccgaacccctacaaaagaggcttgatatggcggcgttcaaccgttccgaattggcagatctgaatgtgttcatggcgatcatccgccggcgcagcttccgtcatgcggcgcacgaactgggggtgacgacgtcggcgctgagccacaccatgcgcaacctggaaacccgcctgggcgtgaaactgctctaccgcaccagccgcgccgtggagcccactgatgccggcagcctgctggccgaaaaattgacccaagggttcgccacgatccaggacgggctcgacaccctggagctgcaccgcgaagcgccgatcggccgcctgcgcctgaatgtgcccagggatgcggccgttctgctggtctcgccgattctgggggagttcacccgcgcctacccgcaattgcgcctggatgtgatggtggaagaccgcatgatcgatatcgtcgccgaaggctacgacgccggtatccgctatggcgccaccgtgccccaggacatggtggccgtgccgctgaccggtgagttgcgctggatcatggtcgcttccccgtcctatctggaaagcgccggcacaccgaaagtacctgcagacctgctgcagcacgcctgtgtgcgcatgtacctgggcgataaaaccacttacaaatgggaattgggtaacggcacccgccaacaacgtattgatgtacccggccatttcagcgcggcggacacccagaccatcgtcgacgcggcgctgcaaggcataggcatcgcctactgcctgcagaaccgcgtgcaacaagagcttgcggacggacgcttggtagaggtgttgcccgattgggcctgtgtgggtgccccgctgtgcatgtactaccccagccgccgccagtcacaaccggggctgcgtcaacttgtggagttgattcgcctgcgtgcagctcaggctcaggcgtaacgcaaagcgtcaggtcagtcctgacgctcggtgttgcccacatccgccgcctcatccagatcattgagcggcacctcggcatcatccatcagcgagccggggtcttcattgcccgggtcgttaagttcctcgtccagcgcttcctcacgttcgtctgacatgaccgtctcctctaaccgccttgggtatcgatatcggcatcggtttcaggcttgggcttgcgctcaggcttgaagtcaggactgtagtcgttttcccgtgccttcgggtccttgacgggttggggatctttaggcgcgtcggctccggtggcgggttgattacttttgctcatggtttacctcctcgcagcgtcagaaaaatacagctgcctgaagctaaggtcgcgctcagcgcccggaagttcccactgttcaagaaccggggttatccacctggatataaaacgcatacgcccccagcaacagccagaacaccatgaacaaccacggcgcgcgcatcgagaacaacagcgacttgcgatagcccttgtgggatgactcggtttcacagaacagcggggaatcgtcgtacgccaggcccatcaccggctcgctgcgcagcagttcgctctgtttgtagtgccagtggtcgatgatttcataagccgcgcggatgcccggccacgcattcaacgaactgaggatgccgagcatgaccaggaacaccggcaccaccagggtaaacagcttgccccactcggggttgaggttgcccatgccggagacaaacgcgatcaccagaaaggactgtgcggtgaggtaggcgtcagtacggttcgccagaatgctggtctcgtactggatctcacggcgatagaagtcgaggcgatccttgggcgagccgaagatcttggcgttgtgttcgctgtggtcggtcagcgccgcttcgggggtgttgggtgaaatgattctgggcacgacagtgctccacacaggttcgaattccgttagaagaacatggcctgaatgaagttcaagtttgttcacgcaccaatctggaacacagcgcgcacctgtggtgagcgggcttttgtggcgagcgagcttgctcgcgctggaccgggctggcgctccagtgcgcagcgctcccgcttttttggggccgctgcgcagcccagcgcgagcaagctcgctcgccacggtgagccctccgttgcccttgcaagccccctcgccacagggaattgcgcagccacaagcattccggcacaaccattgctttatccattcatctgcccgcaaacaggagcattcgttaccccccgacccagagccgaccccataagaaagtaaggaccaggcccagtggcaccctgcgccacgggctcataaaaaaatgcgttttttgcggcagtgccacccaagcaagctgccaaccaagcaatgcaggcactgacaaggtactggaatggctcgatctttctttgatgaaatgaatgacgcagacggcgcatgccgtgcgcattatcaggatttctcccgctggctggccaacacgccgccggaactgctggcccaacggcgccgcgaagccgatttgctgttccaccgcgccgggatcaccttcaccctctatggcgacgaacaggacaccgagcgcctgatccccttcgacatcatcccgcgcagcatccccgccagtgagtgggccgtgatcgaacgcggctgcatccagcgcgtgaatgcactgaacatgtttctcgccgacatctaccacgaccagcgcatcatcaaggccgggatcattcccgccgaccaggtgctgggcaacgagggctatcagaaggccatggtcggcctggacctgcaccgcgacatctactcgcatatttccggggtggacctggtgcgcgacggcgacggcacttactacgtgctcgaagacaacctgcgcacccccagcggcgtgagctacatgctcgaagaccgcaaaatgatgatgcgcctgttccccgaagtgttcgccaaacagcgcatcgcgccggtggaccactaccccaacctgctgctcaaaaccctgaaaagctcaagccgcctcgacaacccgaatgtggtggtgctgaccccgggccgcttcaacagtgcattctttgaacacgcgttcctcgcccgggagatgggcgtggaactggtggaaggcgcggacctgttcgtgcacgacctgaaagtgttcatgcgcaccaccgatggccccaagccggtggacgtgatttaccggcgcattgacgacgccttcctcgaccccaaagccttcaaccccgactcgatgctcggcgtgccgggcctggtggccgcttattgcgcgggcaacgtggtgctggccaacgcgatcggtaccggcgtggcggatgacaaatccatctacccctatgtgcccgagatgatccgcttctacctcgacgaagaaccggtgctgcaaaacgtaccgaccttccagtgccgcaagcccgacgaactgtcccacgtgctggcgcacctgccggaactggtggtcaaggaaacccagggctccggcggctacggcatgctggtcggcccggcttccaccgctgctgaaatcgaggacttccgccaacgcatcaaggcgcggcctcacgcctacatcgcccaaccgaccctgagcctgtccacctgccccacctttgtcgaaaacggcatcgcgccacggcatatcgacttgcgccctttcgtgctttcgggcaaggaaacccgcctggtgcccggcggcctgacccgcgtggcattgaaggaaggctcgttgatcgtcaactcgtcgcaaggcggcggaaccaaggacacctgggtggtggagggctgagtatgttgagtagaaccgccgcagatctgtactggatgtcccgttacctggagcgcgccgagaacctggcgcggatgctggaagtcagttattcgctgtcattgatgccccaggccggacgcagcgacggcctggacgaactggccatgtcgttgctcagcagcggcaccctggacagttacctcgaacgccacaagcagctggacgccgagcgcatgctgcacttcttcgccctcgacgaagaaaacccggccagcatctacaactgcctgcgcgctgcccgtggcaacgcccacgcggtacgcgggcgcatcaccgccgacatgtgggaaaacctcaacgccacctggctggaaatgcgcagcatcgccgccggcggcctcgcgcggcatggcatcagccacttctgtgactgggtcaagcaacgttcgcacctgtttcggggggctacctcgggcaccatcatgcgtaacgacgcctaccggttcattcgcctgggcacctttgtcgagcgcgcggataacaccctgcgcctgctggatgcgcgctacgagatgtttggcgaggagtccgaagaagtcagcgacttgtccgcccgtggttactaccagtggagcgccctgctgcgtgcgctgtcatcgttcgaggcgtataccgagctgtacccgaatgcgctgaatgcccgttccgtgtccgaactgctgctgttgcgcagtgacgtaccgcgttcgctgcacgcgtgcattgaggagctgagccatatcctcgcggacttgcccggcagttatggccgcacggcgcagcgcctggcggccgagttcgaagcgcggttgcgctacacgggcatcgacgaaatcctcgaagacggcttgcacagccgcctcacggactttatcgacactgtgcgtgagctggcgcgggcgattcacagctcgtacctggaagtggtgtgagtgcattgcagtcacttatctgtcatttcgggtgattgacccctcttctgtaccgctcttatgttgggtaggtgaaatgccttcccctcataagaacaggtacagagcatgtccgagttaaccttggccccggccgccgcccataccctgcaacgttggcacgcgatgttggccaaccgcgatctcaaagccctgcccgaactgctggcacccgacgccgtattccgctcgcccatggcccacacgccctaccctggcgcgcccgtggtgtcgatgatcctcaataccgtgatcactgtgtttgaagacttttcctatcaccgtgaactggccagtgcagacgggcttaacgtggtgctcgagttcagtgcgcgggtgggtgagaaacaactcaagggcatcgacatgatccgcttcaacgaacaggggcagatcatcgagtttgaagtgatggtgcgccccttgagcgggttgcaggcgttgggtgaagaaatgggccggcggctggcgccttacctggccaaagccaaatcccaagcccagtgaagcaaaaaatgtgggagctggcttgcctgcgatagcggttgatcagtcaatgatttgttaactgacagaaagctatcgcaggcaagccagctcccacattaggttttgcggtggttactggttttttactaataccggttctgcacggtactggtcggggaacagctttttaagctgcgctactttcggcaggtcgttgatcacgatgtaggggtaagacgggttctcggtcaggaagtcctgatggtaggactccgccggatagaacgccttgcccatttctaccttggtcacgatcggcttgtcgaacgccttggccgcatccagctgcgcgatgtatgcctgggcgactttctgctgctcggcattctgcgcaaagatttccgagcggtactgggtgccgctgtccgggccctgacggttcagttcggtggggttatgcgccaccgagaagtaaatctgcaacagcttgccgtagctgaccttgctcgggtcgtaagtcaccgacaccgactcggcgtggccggtatcgccttcgctgacggactcatactgcgcggtgcctgctgcaccgccgtcgtagccggacacggcgtttttcacgccttggacgtgttggaacacaccctgcacgccccagaagcaaccgccggcaaagaccgccgtttgcaggttaccggcctcggccggcaggtcgagtgccggcggcgcgatcatcaccgcgtcttcagcaccaccgaaggagaacgccgagctttggccgacaaaagcggcaaaggcgagagcgggcaaaaacttgagtagtttcatcacatttactccagaacacggtcaactgtgggagctggcttgcctgcgatgcgatgcatgagtgccagatgaagtggctggcccgacgctatcgcaggcaagccagctcccacagtgattgggttttcaattcagccgaaagtgaaggcatacgccgatacgttcgggtccagaaattcaatgctgaaggttcggtcctgcacggcacctggctgacgaaccagctgatacaaacgctgctcggtcaccgtgccgctgccatccggcgccacgtcggtaccgtgggcatcgcctggggcctggccgtcgatgctgactttgaagcgcaccggcttgccatctgccccaggccccagcaccaagtgcaggtcacgggcatggaagcggtagacgatgcgcccgcccgcctggtcgagggtggcttgctggccaccgacgttccattggccttccagggtccagttgttcagggccagcgtgccggccaccgggtagttgaccaccttgtcggtagccagggtgccggtggtcacgaagttctcggcgcgctggaagcccaggtaggtttccggcgattgcacttcattgctgtccggcgcctgttgcacgcccttggcatcggcttcgatcaggccgcccgcgacgtttttcgcgccggcttcgcgcaacagctgctggatcacccgctccgactcggcgtaatcgccctcgccaaagtggtgataacggatctggcccttggcgtcggcaaagtaatgcgccggccagtactggttgttgaaggcgcgccagattttgtagttgttgtcgatcgccaccggatacgtgatgcccaaatccttcatggccttggtgacattgttcacatcgcgttcaaacgcgaattccggggcgtgcacaccaatcaccaccaggccctggtcgtggtacttctcggcccaggctttcacatagggcaaggtgcgcaggcagttgatgcaggagtaggtccagaaatccaccagcacgactttgcctttcaagccctcggccgtcagcggcgggctgttgagccattgcacggcgccgtccagcggcggcaacgcgccttcgatcggcagcgaattgccatggtccgccgccgccatcatcgcgccgccggccatcattgcaccgcccttctgttcaggcttggcgttcaggtgatcgaccaggctttgttccaggccgcccgtggacgcggtggacaagcgcgacaacacaccggtgtccaggcccaacgcgatggcggccacaccggccagcatcaacgcgcccaggccacggcgcagccattcaccggcaccgagtgattttttcatgaagccgaagactttaccgccgaccagcagcgccaaggccagggaggtcgcagcaccggcggcgtaggccagcaacagcaaggtagtgccgatactggcgccctgcagcgcggccccggtcaacaccaaaccgagaatcggcccggcgcatggcgcccacagcaaaccggtggccacgccgatcaggaacgaagcgcccggacggggtttggcatcggccccggcggcttccgacaggcgactgccggcggccaccagcggccgcgtcaggcgttccgacagttgcggcagcaacagcgtgagtccgaacagggcaacgcacagcaacgcgagccagcgcccgtactgattgacttgcaccacccaaccgccgcccaccgccgccagtgaggccaccagggcgaatgtcaccgccatccccgctaacagcggcaagccactgcgcataaacggctgcccggtgcgagcgaagacaaaaggcagaacaggcaggatgcacgggctgacaattgtcagcacgccgcccagatacgcgagaaccaggagccacatgggatcgtcccttataagaattgataaacatcggcttaagccgccgtaaacgtcatggccgtgccattcatgcagtagcgcagaccggtcggcgccgggccgtcgtcaaacacgtggccctggtggccaccgcaacggcggcaatggatttccttgcgcaccacgccataggaggtgtcggtgtggctggccacggcgttgtccagcggctgccagaaacttggccagccggtgtggctgtcaaacttggtggccgaggaaaacagcggcaaggcgcaacctgcgcaagcaaaagtgccggtgcggtgttcgtcattcagcttgttgctgtaagggcgctcggtgccctcctcgcgcagcacgtcgaattgttcggcggtgagcaggctgcgccactcggcctcggtgtggttgacctcaaagatctcggcagcctcggcctcggtgatcatgttgagctgtttcagcaggccaccggccagaacggcgacgcccaggccaccaccggccagcagcatttgtcgacgtgagtacatggcgttttcctcaatgagcgataacgccatcctgcgcgccgggcggtcgcgaaatcctcacgcagagttaaacaattcgtgataactacactgtgtcaaaacccgcacaatgcgcgcaccacaagcaaaggttttcagcatggaacagcccaaacgtgtcctggtggtcgaggacgatgcgcatattgccgacttgatctgcctgcacctgcgcgacgaacagttcgaggtggtgcacagcgccgacggtaacgaagggttgcgcctgttggagcaaggcggctgggatgccttgatcctcgacctgatgctgcccggcgtcgatggcctggaaatctgccgccgcgcgcgggccatgacgcgctacacgccgatcatcatcaccagtgcgcgctccagcgagctgcaccgcattctcggcctggaactgggcgccgacgattacctggccaagccgttctcgatgccggagctggtggcaagggtcaaggccctgctgcgccgggtcgatgccatggcacgcaacctgaaaatggacgccggcagcctcgacctcaaccagttgttcatcaacccgctgacccgcgaagccaccctgcaaggccagcgcctggacctcacgccgcgagagttcgacttgctgtactttttcgcacgccaaccgggcaaggtgttttcgcgcatggacctgctcaatgccgtgtggggttacagccacgaaggctatgaacacacggtcaacacccacatcaaccgcctgcgcgccaaggtcgaagccgacccggccaacccggcgcgcatcctcacggtgtggggccgtggctacaagtttgccgagggcccgccatgaagctgaccctgacccaacgcctgtcggtggtgttcgccgtcttgctggtgatctgcagcggcacctcggcctggctgcaagtgcgctccaaccacatgcatgagctggaagtggtgcaaggcctgtcccgcgacctggcggcgcacattgcccgtgacacccaattgatggacgccgacggcctcaaacccgacgcggtgcgcaatttgttcagccagttgatgctggtcaacccgagcgtggaagtgtacttgctcgatatcgacggccgcgtggtgggcaatgctgcgcccagcgggcatttgttgcgcgatcacgtggacctggcgccggtgcggcgtttcttgagcggcgccatgctgccgatcctcggcgatgacccgcgcagcgtcgacgggcgcaaggtgttcagcgccgcaccgctcaaggccaacggccagcaaaccggcttcctgtatgtggtgctgctgggcgaagcccatgacgtgtacgacgccaaggacgccaccggcatggcgctgaaaatcgcgctgtggtccatcggcctggtggcgttgctgtgcctgatggccggcctgatcgcctttgcctggatcacccgccccttgcgccagttgacggacaaggtcggccagttcgacatcaacggcgcaccaaaacccgtacaagtccctacgccggagctggacagcagcgacgaaatcgccgtgctcgaccatgccttcgtacaaatggaaaaccgcctgggtgaacaatggcgggccatcacccaccaggaccaggagcgccgggagatggtcgcaaatatttcccatgacctgcgcacaccgctcgcctcgctgcatggctacctggaaaccctgtccctcaaagacgccagcctcagccccgaagagcgccgccgttacctgggcattgcgctggaccagagccgcaaggtcggcggcctggcccagtcattactggaactggtgcgtctggaacacggttttgtacagccggtgatcgaagggttctcgctgccggacctggtgcaggacatcttccagaaattcgaactgaccgccgaagcccgcggcatcaccctcaccgctaccctgccgccgcaggtgccgacggtgctggcggatttgggtttgatcgagcgggtactgaccaacctgctggacaacgccttgcgccatacgccagtcaacggtgaggtcgaagtgatcctggcaccgacgccccacgccgtgggcgtgaccgtcagcgacagtggccccggcatcgacgccgaactgcgcgaaggcttgttcctgcgcgccttcaccattggcggcgcacgccgtgatggcggcctgggcctgcgtatcgtgcaccgcatcctgcaattgcacgggcgcagtatccaactggtagaccgccccggccatggcgcaacctttatcttttccctagaaacccgagcatcagcgcgttgacctgcgccccttgctcgttctggatccagtgaccgcagttggccaacacatgctgttccaggcgcggcactgaatcgggcatgcgcttgagggtgtgagcctcgaacacgcccaccgggtcgcggtcgccaatcaggaacagtgtgggctgcagcacttgccggcccgccagaaactcggtgcgctgccagttgcgttcgaagttgcggtaccagttcaacgggccgcgaaacccgtgttgggtaaaggtttgcacgtacacctccaggtccgtttggctgcaccagcccggcaaggctttcggcgcagcaacgccctcaagcaaagtggcgctgggcggcttgttttgcaaaaacacgtcctgatcctgcatgaacagtcgcagcgtgcgttcgatatcggcattcaactcccgctcggccacaccgggctcctggaaatacaggatgtaattgaatcggtcggcatacagctcgcgcagaatctcgatcaccggccggcgggcgcgcccggcaaaagggacggacatggtgatcaagtgcgtcacgcgctcgggttccagcaacgccaagtgccaggccaccacggcgccccagtcatggccgaccatcaccacctgcttttgcccgaagtgatccatggcctgctggatatcggcgcataaagtcagcacgtcgtaatcagcaacgccctcgggtgaaccggattgaccgtagccgcgcatttcgggggcgtacacccgataacctgcggccaccagtgcaggcatctgctcgcgccaggaatgccagcattcaggaaaaccgtgcagcagccagatgggctggccgtgttcggggccggcaatgtggacacataacgcgataccgttgacggtgatggtctgctcggtcatgggcgtggccttcctcaaggttttgcccagcgtgcaggattgcgcaggttgcagccagcatcattgatggccggaatgactcaggccagcgcccaccaacggggcaataactgccgcacccgcgcctcgccaaagcggtcgtcaatcagcatcaccacgccttcgtcctgctgactgcggatcaccctccccgccgcctgcaccactttctgtatgccggggtacaggtaggtgtagtcgtaaccggaaccgaaaatcgcggccatgcgcgctttcatctgttcgttcaccgggttcagctgcggcaaccccaaggtggcaataaacgccccgatcagacgcgcccccggcaggtcgataccctcgccaaacgcgccgcccaacacggcaaagccgataccccggctgtgctgggtgaactggtcgagaaaggcctggcgctcggcctcggccatgccgcgcgattgcagccacagcgcgacttgcgggtgccgctcggccatcaactgtgccacctgctgcaggtaatcgaagctgctgaagaacgccaggtagttgcccggcctctgcgcaaactgccgggcgagcaattcgacaatcggttccagcgaagcttggcgatgcacaaagcgcgtggaaatctcgctgacgatgcgcacctgcaattgctcggccttgaacggtgactccacatccacccacgcggtgtctgccggcaagcccaacaggtcagtgtagtaatgacgcgggctcagggtcgcggaaaacagcacactgctgcgcgcggcggtcaacctgggccggatgaattcggccggcaccacgttgcgcaggcacagggtcgaagcactgcgcttgccaccgaattcgcgcttgctgatatcgaagatgaagtgctcgtcgaacagctccgctaccttggcaaattgcagggcctcgaaatagaaggcttgcaggtcgccgctgagggcttcggggtggtcgttgaagtaatcgcccatggcgctggcacacaggctcaaggcctgaagtaacttgtcgggtttgctggcgtaggcctggtacggcgagacctgttccttgtgcagggcattccattcgcggttcaggcgttgcaggggtttcttcagcggctcgggcgcgctgtcgcgcaaggttttgaggctgtactgatcgaggctcgcgctgtacatcgagcgggcgcgctccaccaggttgtgcgcttcgtccaccagcacggcggcgcgccactgattgagctgggcgaggccgaacagcatggcgccgaagtcgaaatagtagttgtagtcagcgaccaccaagtcggcccagcgcgccatttcctggctcaggtaatacgggcagacgtcatgggccagtgcgacttcacgcaggttgcgctggtccagcaggcgcacattggcggcagccatgcgtgcggcgggcaggcggtcgtaaaaacccttggccagcggacaggaatcaccgtggcaggctttatccaggtgttcgcaggctttgtcccgtgccaccagttccagcacgcgcaagggcaagtcggggcagctgtcgtacaaaacctgggcggcatccagtgccagcttgcggcccggggtcttggcggtgaggaaaaacactttgtccagttgctggggcgccagggccttgagcatcgggaagatcgtgccgacggtcttgccgatgccggtgggcgcctgagccatcaggcagcgcccggtgctgaccgccttgtagaccgtttcggccaacgagcgctggccggggcgaaaggccgcatggggaaacgccaggccttgagcggcacggttgcgcgcgtcgcggtgctgcatttcgcgtgtggcccagccgaggaacagcgcgcattgcgcgtggaaaaacaactccagctcggccgcctgaaaacgctggttcaacagcgtttcaccctcgccgacgatatcgaaatacaccagcgccaaatcgatttcactgagccccagcttctggcacatcagccagccgtagaccttgacctgcgcccaatgcaattggcggtggttggcgggttgggcgtcgaggtcgccgcggtaggttttcacctcttccaggcggttgctgtccgggtcgtagccgtccgccctgccccgcacggtgagctgccggtactcgccttccagcgcgacttcaggttgatagtgcgcactgcgccgcgaggccaccgtgcgatggccgacaataccttcctgggcgctgggtgacggcgtaaagcgcaggtcaaggtcaccggccttggccgtgaactcacacagtgcccgcacagccacgctgtagctcaagcgggctctgcccagcgcacatagcagacggtgaccggcatctggtactcggcgcagaactccagccagcgcagctggttgtcttgcaagcggtcaccggggcctttgacctcgatcatgcggtaggttttctgcgcgggccagaactggatcaggtccggcatgccggcgcggttggcgcgaatgtccagcagcaagcgttcaaaccagtaacgcagatggtcggcgggcaggcactccagggcttgttccagcagctcttcactgagcaggttccagaacacaaacggcgactggatgccccatttgtccacatagcgctggcggatggtggctttgtaatgctcgccttgcagttgttcgaagcacgcggtgaacagggtggcgcggcgctggtgaaagtcttcgctgtgcaggtccaccggcccgcgctggaacgggtggaaaaacgcgccgggcaagggcgcgaagatcgcgtcccagcacagcaggccgaacaacgaattgatcaggccgttttcgacgtaatgcaccggcccatgcggctcgctcaaatgcgcctgcacgcaatactcaaccgacatcagcggctcagggaaagccagcgccagatccagacgcgtgacttcccggggcttgaccttgggcagcgccggttcgcccaatttacgccgcaggcgtggcagcacgcgtaataaatgctgggcttcggcggcgctttccggagcctgttgggcggtgcgcgccagcgccatcgcctgggtgtagtcttcctgacgctccagcacgcggatcagccgtgagcgtgcgccagggtaggcacactgacggtaaatctgcgctgccagcgccagttcagcactgcgctcgcaatactggccaacctgaaacaacagcttggcgcgacgtttttccagccaggggttgtcggtgtgcagcgtggcaatctgcgccagcacgccttccagcgcttcacccgcctcgtacgcctcctgacactggtgcaggaacagaaacccctgcacgtcctcgcgattgcgcaggccacgggactcggcgcagaacgcgactttttcgtaggtgtagatgcccaggtcggccagcacgaactccgaccagtcctggtacaggttgccgaaaaacatcaggcgcaggcggtcgcacaggtccatcaccgtgaggctgtagagcgcatcgttcagttgcgggcaccagtgggcaaagctgcgttgctcggggaactgcgccgtcaatgcctccagccagtcggtctttttgcctttgggttgctcgatccatggtttgaaagccccaaggatttcgcctttttgcagcaaggcgaacaggtcttcaaacgcgagcaacccctgagcatcgacccaaccctgctccaccaacgccaacgcagctgtgtgggtgcaaccgatctcgagataattgagcttgctcgcccgaaaatgcacacccttgcgcatcaccatgcgcaccaaaagggcctgggaagcctgcggcaacctgtcgaattgctgaataaactgcaattcgtcggggtcgagcaaatcggcatagcgctgccccagccacagcagcacttggcggaagttatgcaggtaatacaaggggtcgtcgagggggttggccatgtcgcgcgccgatcaaatactggttatgcatacagagtgccgtcgcaaacgccttgttgcaatcggtaatagataaatggcgcacgcaactttccgtataaaagtgatcagataagggtgtcgatcgcgtaacatttgctgcccgcagcccattgcgcgggactttccagggttaaaggtaagggttatgaacatgaagaatttgggtctgccactggttgcactcacttttctggtattggccggttgctcgacgcaaacggtggtgacgttgcaaaacggcacacagtatttgaccaaggattcgccgaagaccaaaacagtggatgggttctacgaattcaccgacatcgccggcaagcacatccgtgtcaaagccgatgacgtggcgacggtacgcagcgaaaaatgacaacaaaaaagccccgcaaatgcggggcttctttttggctgctcgtcaccggtagtacgggtggtagtaatacggatgatagtagggatggtaatagtacgagtggtagtacgggcggtagcagcacgggcccggataggccgggtacaccgcacacccgccgagccccagcagcaccagggcacacagcagcaaacgaattcgggacatgctcggctcctcacacatgacgcgcgaaacatctcgcaggtagtcattgaacgtttgagccggtgcaatccgtcgtcgtgttcagtgaagattaatttaccgaaggatttgcctcgctatggcgtttaaccggtaagtcgctttcatctctgaaggcgcagcacggagaacgacagccatggcacgcatgccccaagcactacgcgcgcttttcctgatccccctgacactggcagcgctggccagcgcgccagcctttgccgacaccatcatcattcgccagccgccacgggtggtcgtggtgcaagccccgccgccgccggtgtattacgggcattggggctatgcgccacgaccttactactatccgcatcattactacggctatgggtatggctacccccggccgtactggcaccgcggctggtaaaggcagcgcgtggcgtcagctgatggaaacaccatcagcccacaggccgccgtgcccgacgcccaccagcgtcaccgagtcggcgccaaaggtgagcaccgtatcggcgccgaccaccttcgcgtggtcacgcaggtcggtgctgccttccacgtccttgaacaccagtttgtcgctggtctggtaaccaatcacgcggtcattgccgaagtggccactgaacagaaaggtgttatgcccactgttgtcgcggatggtgtcgttgcccttgccgccttcgataaagtccgcgcccttgccgccctggatcaggtcgttgccgtcgctgccgatgatgaaggtgttgcctttgtggggctcggcattgcggttcaggtcctgtacccaggtgttggcccgggccgggtcggacaggttggcgacgatcaccgtggagtcgcgggtcatctggtcgtagaaaccggattcaagaatgcgcgtcatgccgtcgccataaccggtgggcaggtgcgacacccaggtcggcaggttgacgatggaaaacggcagcacattccacagcgacgaggcgtagtggtcgttgaagctgacgatattgtcggtggtcgactcgtggggtttgtcatgcacgcccagggacgacaggttgaaggatgaaccgtcgagcgcgcggaacaccgggtcgttctcgtagccgatattcagcaccttgtcgctggcgctctgggtgggcgacgcgtaggccacatagttggaatccttgtagaaccccgaccatttgttggtactcaagtccgccatgctgttgaccgccagcccgccgaggctatggccgctgaccaccacgtccttgccggtcaggccatgggcgctggcatagtcagcgacgtttttgagcaagccgccaaaggcttcgccggagtaattttttgcatagtccttggggccgagtgcggcgagcagatcactgatgatgtcgccgatggagtcactgatcagggtttcccgcggcccggacgtgccgcgaaaaccgatgccgatttcgagcaacttgcccgcatcatcgtatttgcccagcacttcgacctgcgccgtggtgtagccggctttttcgccgaaaaacgtgccccgcgcgtccaccttgccgctgtagcccaaagcgctcgcgctgatcggtgtccaaccggccttttgcaccgcttcaagggcggctttttccgagtcagggttccacggaatgccgggaatcacaccctgtgaatcggtgctgcccagcagcgcactcaccagcgtggccggcaagccaagccccaggccgttgtgctggtagcccacggcaaagccgttatccaggttgtggtaggaatacagcgtgatcgccatggcatcggcaaacaacgctttggagccctcggtgccgaggtttttatagtcaaagatacccatggtagtgcctctctgttgttggatttgtagagaaagcggaaatactcattagcctgtttaagcgccgagcttgtgtgggagctggcttgcctgcgatgcaggcgcctcggtgagtcagtcagaccgaggtgatgccatcgcaggcaagccagctcccacacaaggcggccccacagaaagcttttttagaacgcccagtcgaggctcaaccccaccccatgcaccttgtctttgctggccagcaagccgttgtagtcaaaattcacccgtgcatccttggtcaacgccaggctgacccgcgcgcccaccagcgccgcgtcacgcaccatcggcgcactttccacagcaaacgaaggaccgcccgaagcaaacgccaggtgccgctcggaatcggtgctgctcaggttgtgctgccagcccagggtgccggacacctcgagttgctgatggtcattcacgttgaaggttttcaaggcacgcacgcccagggtgctcagcaccacgtcgcgggtgtcgtcgtggcccttgagcgcggcggcatcgcccttctcggtgaacccatcactgtccaggtgcacataggccaggttggcgaagggttccaacgccaggggttgcaggttgacgcggtacgcagcttcgccgaacacctgggtgctggtggcatccactttgactttttgcttgccggccacattgccgtattgcaggtcacgcttcacatccgcacggtgccagctgtaagtcgcgccgccgctcaaacgcaaggcgccgatttcatgcccggcgtacgcgccgaaatggtagctgtccaccgaagcacggctgtgggtgtcattgcccatgttcagcgaagtatcgctgtagccggcgaccaggccgatgcgggtggactcatcgagcgcaccgtccacacccgccaacatgccgcccagggaggtggtgtagcccgccgtgtcactgcggctgtcggtcttgccccacgcgcccaatgccttgacccacacgttgccacggctgtcgacagtctggctggacgcgcccatctcaccgttgcgcaaacgctcgcctacggcctcacgcacgtagcggctgtcgttgatcagcgcggtttccacggccgggtagatttcgccggacagttgctggaacgcgccctgtgccgaggccgccgttggcgccagcagcaggctttcgtacaccgcgttgcccgcgcccaacctgtcggcagccgccgccacggcacgctggttcggcgtggtggccacactggcaaagctgttggtgcgcaccacatccagctgcacaccggtcggtgcgtagttcagcgtgccgccgacaaacaggtagttgggcaccaccgcgccaaagctaccggtgatgccgcccgccgcttgcaggatgttgtactggcggccgatcaggctttgggcctgggcgttggtcagcagcgtcgggctgttttccagggccagggtcacagtgccgccgttgagcgtggcagtgccgccagcgacgatgcggtcactgctggtttgcgacaattcaaccgcataggtcgaaccggcatcgaaggtcacgttaccggccacattcagcgtgccgatggaattgcccggcgccacggtgccgccgcttttcgccgtcaacgagccgatacgccccgagccgcccaccacgccgctctggctgacggtgacgtcagaggtgagcgagccattgatcgccaacaggccttggttgaccagggtcggcccgctgtaggtgttggcgccggtcagcaccagcgtgccgatgccctgcttggtcaggccgccatgcccggcgatgtcgttgctccacacgtcgcgcccgcaatggatgtcattgcacaggcgctgggtcggtttaccggcatccaccaccgcgcccacgcctggcaagtccgccacaaactgcccgctgccgtaggcgccgtcgatgcggaactcggccggaatatcttcagccgtgatgaacatccccggcccgttgaccgccttgccgaggttgatcatgccccagccatacagggagtcgatgcccggcgcaccgaggtcggtggccgtggttttgagcagcgtggagatctggtcgccgctcatgtaggggaagcgctccatcaatacggctgccgcaccggccacatggggcgcggccatggacgtgccgtttttgttggcccaatcggtggtgaggttgctcaggtcggtgccgttgataatcgaactgaagatcttggtacccggcgccgacacgcaaaagctcgccgcataaccgcagcgcgacgagaaggtgctgatcacgtagggatcggggctcgcggtgttcggattttgctgcaaggcagcgaccgacagccagttcggcgcaatctccggcacaaagtacgccaggcccgacatcgcgtccgggttgttgcggttgtagtcgttgcccgccgcaaaaatcgtcagcacgccactgcgcgcggcatcgattgcgccttgataagcgccaccggcgagggtgccgaggatcggccggatgttattgaactgcgtctgggcttcattgacggtgaagttggggaacgccggatcgcggccgcccttggcgtactgatcaccgataccgatgccccagctgttgttgatgatgcgtgcaccgctggcaaccaacccgtcccaaccggctttgtacaccgcgccgtcgttgccgaggataatcccgtcttcgggccctgggtcgccgttttccgccgtgatgatttgcgcgttgaacgccacgccatgcatcggcccgccgtctcggttgcccgcggcaatcccgccgacgtgggtgccgtggttgcccagcttgccgttggagtccttggacggcgtgccgtcataacggaacgcgtcgcccgcctttaccgggatatacgggtcggtgtattggcgaatgccctcggtgacgatcgtcaccaccttgttggggctggcgaattccgggtgctgggcgtacaccggctggtcaaaaatccccagcttcacgcctttgccggtatagccggcagcgtaggccgtgtcggcctggatggcgcccaggccccaatcggccttgaactcgttgctgcgccaactggcggcgtcgcccactttgccggtttccacatagggtgcggcctgggcggtccccaggcttgccaggcagcacagcagcgcgccgtatggcacgcagctcaaggccttgagcgggtagcccgggcctgtgtgagtggcggtaaataaccctgacttgcgttttttcacggtgaccttccttagttttcttattgcacttatttgaaaatcatctccacccaacaccctcgatcacctgtgggagctggcttgcctgcgatagcggtgtaccagccagcaccttcgccactgaccgaccgctatcgcaggcaagccagctcccacacttttttgatcgatggtgttctttagaactgccagttcaggctcagacccacaccctgggttttctcgcggccacccaactggccgttgtagtcgaggttgacccgcgtggtcgggctcagtgccaggctggcctgcacgcccaccagcgccgcgtcacgcagcaatggcgtgctgcgcaccgcaaactgcggtccacctgcgacaaaccccagatgttcttcggactcaacggcggtcaggctgtgctgccaacccagcgaaccggaaagctccagctgttggtggtcattcagcggcagggttttcaaggcgcgcaggcccagtgtgctgagcaccgcatcacgcctgtcgctgccacgttccagcgcggcggcatcgcctttttcgtggaaggaatcactgtccaggtgcacataggccaggttggcgaacggctccagggtcaggggttgcagccggatgcgataggcagcctcggtaaacagctgggccgtacgcgcatccagcttggctttttgcttgccgctgacttcaccgtattgcaggtcgcgcttcacatcgccgcgatgccagctgtaggcaccgccgacgctgacacgccagtcgcccagttcacgcccggcgtaagcgccgaagtggtagctgtcgacggaggccgatgagtgagtgccgctgcccatgttcaacgaactgtcgctgtagccggcgaccacacccacacgggtctgctcgtccagtgcgccgtccacaccggccagcaggccgccgatggaagtggtggtgccggccgtttcgctgcggccgtcggccttgccccaggcgccgagggccttgagccacaggttgctttcaccggccaccggcacatggcgcaggcgttcacccacggcgtcacgcagttgcaggctgtcgtttatcagcatggcgccgactgccgggtagatctcgccggacagttgctgcaaaccttgtcgcgccacggcgaccgagtctgactgcagcacactttcatacaccgggtttcccgcgcccaattgctcggcggccgcggcgacattgcgctggttacggttggcagcaacgctggcgaagctgttgttgttacggcccacgtccaaccgcacgccattggcggcatagtccagggtgccgccgaggaacaggtagttgggcaacacttgcccgaactggccctgaacaccgcccgctgcctgcaggatggaatactgacggccgatcaggctttgcacctggctctggctgagcaacgtggggctgttttccagcgcgagggtcagggtgccgccgccgagaatggccttgccgccggccacaatgcggtcgctgctggtgggcgtgagttccaccgcataggtggagcctgcgcccaggttcacatcgcccgccacctgcaaggtgcccacggaattgcccggcgccacggtgccgccattgttcaccgccaacgcgccaatccgcccggaaccgccgagggtgccgctgttgttgacggtcaccgccgaggtcagcgagccgttcacggccagcaggccgccgttgacggtggttgcaccgcgataagtgctgtcaccgctgagcaccaggctgccggcgccggacttgatcaagctgccctcatacacccggtttgccgcagcggcgtcacgtgcgctgccgaccgcgtaatcggtcttgtcctgttggctggcgttggccgccacgccgttttgccagcccttgtcgatcagggtttgctgccacgccgtgtgctcggcacggtcttcggcctggcgctgaatcaaggcctggtcggaaatgccgttgctccatacatcgccctgcccggcggccaggctcacgttcatcgcgccgagcaactgcccaggcccgtgcatcgcacggcccaggtccggcacgccccagccgacaatggcattgggcgcctgggtgatcgaaccgtcgagttgggtcgcggtggtcaacagcacctgcaacgcctgctcgttggtcatgtacgggtagcgctccatcaccagcgccagcgcaccagtggcatggggtgccgacatcgaggtgccggatttcacgccatagccgccaccgggcaccgtgctgttgatcagcgcgcccggggtggaaatgcaccagtatttggcgatgccgcacttgttgtacttctggttattggctttatccagccccgacacggcgagccagtgcccctccagctccggctgaaaatacggcagcgccgaacgcacgctggcgttcgcgtagccactgttgcccgcactgaacacgttgatcacgccggccttggccacgtcggccgccgcgtccagccaggtgccttgattgtagtgctgggcataggcggcgtgcaggccgccgagggtctggtaactgacatccggcggctggctgccccagctgttgttgatggcgcgcacgccggaatccaccagcgccgtgtacaccgctttgaagtatttgggatctggcgttgggccgaacagaaagctgtcgttggcgttggtgttgcctacgtagatttgcgcgttatacgccacgccatgcatgcccacgccgtcacgcgccgcacccatggtgccggtgacgtgcgtgccgtgggagtcgttgttggggttgagcgcaccggtggtgctgaacgggctgccgttgacataggtgccggtggcggtgaccgcgtggtagcggtctttggacgcttcggggtgatcggtgtcgaaacccgagtccagcgcgccgatttttaccccgctaccggtgatgccggcggcgtaggcttcatccgccttcatgcggccaaggccccagtcgctctggaactcggcggaacgccaactggcggggttacctgcttggccggtctcggtgtaagccgcctgcgccgcaacggacaacagcagcaaggaacctgcggtaaagggtttgaagcgggatgagtcggtgatcatttaaaccatccttattgtttttatgggtgctcatttcgtcgggccaaaggcctcgtccaccttggccaagtcggtgtcgcgcaagttgcccgcgtagtagtgcaatttggtccaggccatcaaatagtcgtaacgcgcctgggccaggtcgcgacgggtgctgtacagctgctgctcggcgttcagcgcgtcgaggttgacccgctcgccgccgaggatgctttgcttggtcgacaccaccagcgcttcggcggaggtcagggccttttggtaagcgcgcagcttgctcacgcccgacaggcaggcgctgaactggcggcgcagctcgatcagggtttcgcgggtcttgccttccagctcgtactcggcctgctccatgccgcggctggcctggcgcgtggacgccgagatgccgccaccggcatacagtggcaagctgacttcaatgccgatggtgttggtgtcgtagcgctggttgtaggtgttgccgctgtccgactcctgcttgcgcgagctggcataggcggtgacttttggcaggtgcccggagcggttgcgctccacttcataacgcgccacttccacggcctggcgttgggacgcgagcgtggggttgttactgatcgccagttcatgccaagtgtcgtagttggcgggcgtgagggagaacgccgcaaagttctgattcagcggcgccaggtcattgatgttgacgctctgcacgccaatcaacgcacccagctcgcgcagcgacgcatcctgctcatccagcgcctgaatctcttcggcggtggccagctcatagcgtgactcggcttccagaatatcggtgcgcgtgccctcgcctcgctggaacaggtgctggttttgctggaattgctgctcgtaggctttctttttggcgcgggcgatgtcgatctggtcctgggcaaacagcgcctgggtgtaatagctcagcacgcgcaccagcaaggcctggctcttgtcacggaaactttcatcggcaaacagcgcctgggccacgcccttgcggtagttggcgtaggcttcgtagtcgaacaacggttgttgcaggctgaaggtcgagccgtagctgttgtagttgcggtcgtcgcggtagctgccgccgcgtccgtcgggcaaatgcgcctcggagttgttgcggcccttgttgtagttgtaggacagcttgggcaacaggccggcgcgaccaatggcgcggttttccaggccggcgtcgcgctccttgatggcccccagaaatactggatcgttacgtaaagcctgctcgtacacatcaaacgggcccatcgccgcctcggcaccgccacacaccaccatcaaagcaatgaacactgacttcatgctcattcctcagtcaacgcagagccggcgcgatcgagcagcggcttgaacaggtaattgagcaacgagcgctcgccggtgcgcacgaacatctcggcaggcatgcccggcttgatcaccaggccgtgaagcttggccagcgcgtcttcgctgacacgggtgcgcaacacgtaatacggctggccggtcttttcatcgagcatctggtcggcggaaatcaggctgacttcccctggtacgcgcggggtgcggctctggttgaaggcggtgaacagaatgtcgaccggcaaatgcgtgcccaccttgtccaccaaatgcacgggcaagtgcccttccacctcaaggcgcgtgccttggggcacgatttccagcagggtttcgccggcgcgcaccacggcaccttcggtgtgcacgcccaggttgaccgcaatgccgtcagccggggcgttgatctcgctgtgttgcaggtcgaacccggctgacgtgagttgttgttccagggtcaggctgcgcagttgcgcgtcggccaattggctgcgcacttccttttgatattcctcactgtgctgctgcagcttcagacgggattcaagaatgccctgctctatgcggccgctttcgccagcgttttgcgccaggtcttgctgcacctgagacagttggcgctggtagtcgagcaagcggttacgcgggatatagccgttgtcggccaagggttgcaggttggccagttggtcgcgcagggattgggcctgagcggtcaggtcggtgcgggcacgacgcatgccgcccagttgcgaggtggccccttcgatattcgcgcgaatcccggcctgctcacgggcaaacgcttcgcggcggctgctgaacagctggcgctggccttcgagcaccagagccagcgccggatcagggtttgcgctcagttctgcgggaaaggtcaccgccgattggttgtcacgctcactctgccagcgcgccacgctggcccaggccatgcggtactgggcttgcagggattgcacatcggccctgttctgagtctggtcgaggcggaacagcggctggccttgctttacccactcgccctccttcaccagaatccggctgaccacgccggggctgagggtttgcacggccttgcgcttgcccgacaccaccaccgtgccttgcaccgggatgccttggtccagcggggccaggctggcccagaggaagaaaccgccagcgccgaccaccgtcagcagccaacccattttcacgaaaaaaccggcgtcacgttctttaacacgaggttcaacagtaaggctgctcatgcgcctgggttccttccggcttggtactgacgactgaaactcaccccggttttttccttgggtgcttcctgctggcccgacaaggcgcgcagcacttcctggctcgggccgaatgcctgcagacgcccttcattgagcaccgccaacttgtcggcctgggccaacgccgaagaacggtgggtgaccagcaccacactgctgccctgggctttcatctgcacaatggcactggccaatgcggcttcgccgaccgtgtcgaggttggaattgggttcatcgagcacaatcaaacgcggcgcgccgtagagggcgcgggccagagcaacgcgctgtttctggccaccggacaggccgccgccgttgtcacccagcacggtgtcgtagccctggggcaagcgcaggatcagttcgtgcacgccggcttgttgtgcggcctgtaccaccagcgccgggtcagcgtcgcggaaacgcgcgatgttgtcggcgatgctgccgctgaacagttcgatgtcttggggcaagtagccgatgtgcgggccaaggtcgtcgcggtcccagcgatggatgtcggcgccatccagccgtacggtgccggccagggttggccacacgcctaccagcacgcgggccagggtggatttgccggagccggacgcacccagtacgcccaacacttcgcctgccccaagatggaagctgacctgatgcaatgtcgccatccgccgccccggcgggcccgcgctgacttgctcgaaactcacctggcctttgggcgccggcaaggccatctgctcggcctcaggcgggaactcgcgcagcaactcatcgaggcgctggtaggccagcttggccgaactccactgcttccacacggcaatcaactggtcgatggggctgagcacccggcccatcaggatcgagccggcgatcatcatcccggcggtcatgtcgcctttgatcaccagtaaggcgcccaggcccagcaccaacgattgcaggcacaggcgcaggcttttgctcagcgaagtgatgaccgagccggtgtcgctggccttgttctgcaagccgaggaattgcgaatgcacagcaaaccagcgtttgcgcaacgcacccagcatgcccatggcctggatcgtctcggcattgtgcaaatggctggtggccaactgggtcgactgctgggaaaacccgctggcctcgcccaagggctttttggtcaggtattcattgaggcacgccagcgcaatcaacagcaccgcgcccgccgtggccagtacgcccagccacacgttgaacaggaaaatcaccaacagatagacgggaaaccatggcgcgtcaaaaaacgcgaacagcgcgggcccggtgatgaactggcggatatgggtcaggtcgcccagggattgcccggcgtggccttgcccacttttcaagttgcgttcaaacgcggccttgtacacgcgcaagttgaagcgccgctccaactggctgccgatccggatcacgataaaactgcgcaccacttccagcgtgccgataaacgcgaagaagcccacgaccatcagcgtcaacatcaccagggtggtttcattctgggaagacagcacgcggtcatacacttgcagcatgtaaatcgacggcaccagcatcaacacgttaatcaaggcggtaaaacaaccgacgctgatcaaaatactcttgtattcacccaacgccctgaataagggcgcaaccgcatgggacttcgccatagtgttagatcttccctggagcgaataatgcgcaatagttgccctgccccctgaatcggggacggccaactaatcaatcaagctatatgcatataactttttattagtaagttcgttgcaatgtcacttccgtgcccgacggtgtgcgcccggtgtattcaccttctttctggcggttcaaatgggtaatgccagtaccttcggcattcatcagccagatgccatccggggtgggcgaccagctcaggggtttgtcacccagccattgttcggcgcatgccacatcaccggccaacgcattggcctgttccagcaggtccagggcgcagacctgatcctgttgcttcaattcccagtgcccggccaattgggcggtgctgggtaacacgagactgctcgccattgcttgggctcctgccgacacgaacaacacctgcgacacgcaggcgatcaaatgagaaaaacgcggcatttcaggctccgtcctggaacgcggcgccggagcgccgcgcgttttacatcacgccacgatgtcgctggcgacggcctggccgacggtggtgacgaggaaatccgccacgccgtgacccgagaagtcgacggccagagtgcccaggttggtacctgcggcatagctcagcacagcatcgccggcatgcccggtgaacgcattgacgaagctcaagcctgcacctttggtgataccggacaggtcgatcttgtccgaacctgaggtgaagtcaaagatcttgtcggccgcgcccggacgcgagtcggaactggcaccgtacacgaaggtatcgttgccggcgccgccccacagctggtccgccccgccaccgccgtagatgatgtcgttgccggcaccgcccttgatgatgttgacggcgtcgttgccgatgatcaggtcattgcccgaaccaccgaacgcattctccacggtcacgcccttggcgatggacacgttgcccaccaggccgccaacgtcggagaacgaaccttcagtgaggttgatcttctggttctgggtaaagccggagaagtccagggtatcgttgccgccaccgtcccataccgagaacaccagcttgtcggcgttggatgtggcgctgtagaaatcacgcccggtgttggagttgaacccgtaggtggtgtcgccggcgcgggtgctgtagttggcgccgtagagcttctggatcgcggcaatgtcgtcgatcagcgggcccgacgcgtaagcctcgacgccgcctttgctgaagttctggttggtgttgctctcgctccagtaactcatgacgctgtagccacgcgtgtcctgtccatagtccgcgtctttataggtcgggttgccggtcccggcgttgtagtcgccagggtgcgccaggcccagggtgtggccgatttcgtgggtcagggtctgacggccgtagttgttcacgtccggcgtcttgttgaccgtgtagctgctgttggtcaggtaccacgaggtgccgtcgtagcctgcgccggtgccgggcaggtaggcgaaggccgctgcaccggcctggccgccgctgtagttggcgaaggtcatgtgcgtgtcaccgcccgtggcgctttcggtaaagctcacgttggcgacatccgaccaggattgcatggccagtacggcctgtgctttctgctgggcgttgaactggctgaacccggagatgccatgtttgttcatggttgccgtggtagccgaggtgaggaaggtgtaagtcagatcgatcttgccgttgtggttcacatctttgtacgaggcgccatcacgcagcaggtggtccgctgcctggtccaccgtccaggacggtttaccattgaccgtgaggttaccgccacggtcgtacagatggctaaagctatcgatttgcgagtaagcagtgctggcttgcgcggcagatacaatagctttgtcttttacttttgacataaacgtacttccttgtttgcaagtgcatcagtctttgttcgacaggaacctcgcgggcgagatagtcctatcactcgcctcttttgaaggcgtatcgaaactgacacaacttgaaatctttcgtctacaaatatttccgcactgaaaatgtgacgtagattcaacttgaggaagtgctgcacagcgtttattggggacgattgcccttgcccggtaaaattccccacggtgatatttaaatattaaatagcagtaaagccgcccaactctggcagctctcttaaataatggatccaatatattgtcacggtgtcattggcaacattaaagagccactacttaaactattaattagagttgccccctattaccgggacacgcgccagcctgatgtgtgcagtgcgtccaataatgtttcgccggccaaacctggcaccttgataccctcgtccgtggtcatatcctccccggccagcagcgcattgatgatcgcctcctccacggcctctgctgcggcactgaacaagggtgaaatgtggtcgttgttgaccatctgcactgcgctgttcagcggcaggttcttgcgcccgtaatcggcgggcggcaggtctcgattgccggtggcgaatgccaggaacaggtcaccgctggaatcctcggtaccgccgcctgtgcgtgcgatgccaatggacgcgcgctgcgccaggcgccggcactggtgcggcaataacggtgcgtcggtcgcgatgatcaccacaatcgagcccatgcccggcgtgccccgcgcagcgaaaggcgatgcaatgcccgccaactggcggccgaccgggtaaccgtccacgcgcagctcctggcgcttgccatggttggcctgcaccagcgcgccgacggtccagccgccgtgctccgccggcagccggcgtgatgaagtgccgatgccgcccttgaactcgtggcagatcatgccggtgccgccgcccaccgcgccttcctcgaccgggccggctttggcgtcgtccagcgcctggcgcacatgctcgggttttacgtgctggccccagatgtcgttgagcgtgccgtcgtaggtttccatgaccaccggcatgcaccaatacaccgccgggtccgccaggcgctcgcgctccagggccaccagggtatcgcgcacgatgccgatgctgtgggtgttggtgatcgcaatgggcgtcgtcagcagcccggcctcgcctatccactcaaggccggtggcatcgccgttgccattgagcacgtgatacccggcgaagcacggttgctgccgcgcctcgccctcgcgcggctgaatcaaggtaaccccggtacgcacctgcttgccgtcgacgcgcgccttgagcgtgctgtggccgacccggacacccggaacgtcggtgatggcattcaattcaccgggcgtacccagccccaacgtgataccccattgcctggcgcgcataaccactcctcgaaggtcgctcaaatgaggcgacgttactgcccgggcgctgaacagccaatgcccctattggcgtactccccttgacgatagcgggtaaaagccgaacccttggccggtcttttgaaggtaggagcctgttacatgagcctgttcaaagaggtcggcatgcacgcagacctgggccgcactgttgcgcttatcggcactgagcggttctggaagcaactggtgctgttgctgcatcaatgcctgcctttcgataatgccctggcgattttctatcccctggacggccaacctctgccccttgaggagtatgacgcgcagcccggcagcaaaccggcgtcgatgccggtgtacctcgatggcctgtatgtgctcgaccccttttaccaggcctgccgcgaggggtacgccagcggcctgtaccgcctggaggaagtcgccccggaccatttccggcacagtgactacttcctcagctacttccacgacaacgtgctggaagacgaggtgcaattcattctgcaattgccgggagcgggaaccgtgtcattgtcactgggcatgcaacgccggttcagcgttgaagaaaccggcttgatgaccctgctggcggcgtgggtgctgccgttgatgcaactgcattggcagcagcgtacccaacaggttccgggcatgagcagccagatacgcgacgcgctgagccaattcggctgcggcgtgctttcggagcgcgaactggaagtcgcccgcctggtgctgcgcgggttctcctccaaggccatggccgagcgcttgaagatctcgccggacaccgtgaaggtgcaccggcgacatctgtacgccaagctggatatttcgtcacagccggagctgttttcgctgtttatccagtcgttggggcatgatctgcaaaacccgtgattcgcggttgatgcgtgccccctgtgggagcgggcttgcccgcgatagcggtgtatcagccaccacacaggccaactggcataccgctatcgcaggcaagccagctcccacatttttttcagcgcccagtccgaatggtgttccacacccgcgtacgaatccggtcgatgttgagcggcatggcctccagcgcgaacagcttgcccatcatgtccgggctcggatacaccttggtgtccgccttgatcgccgggtctaccaggctgtctgcggcgctgttgccgttggcgtagtgcacgtagttggtgatgctcgccatcacttccgggcgcagcaggtagttcatgaacgcgtagccggctttttcatccggggcatcggcgggcatggcaaccatgtcgaaccagatcgcggcaccttccttgggaatgttgtagccgatgttcacaccattcttggcttccttggcacggctttcggcctgcaggatatcgccagagaaaccgacggccacgcagatgtcgccattggccaggtcagcggtgtatttggaggagtgaaagtaggccacatacggccgcactttcatcaacaggtcttcggctttcttgtagtcctcagcctttttgctgtggtgcggcaggcccaggtagttcagcgcggcgggcagcaactccgggccgttatcgaggatcgccacgccgcatttctgcaacttggccatgttctcgggcttgaagatcaggtcccaggaatccaccggcgcgttgtcgcccaatacggccttgaccttgtcaatgttgtagccgatgccggtactgccccacaggtaagggaaaccgtgtgcattgcccgggtcgttgttttccagggccttgagcagcaccgggttgaggttcttccagttgggcaactggctcttgtcgagcttcttcaaggcgccgccctgaatctgccgggccatgaagtggttggacggaaacaccacgtcgtaaccggatttaccggtcatcaacttgccgtccagggtttcgttgctgtcgtacacgtcgtaggtgaaaccgatgccggtttctttctggaagttcttggtggtgtccggcgcgatgtagtccgaccagttgtagatcttcaccgtctcggcggcctggctgatagaggccaccaacatcaagggcaacagggcaatggctttcatggttcgatttcctggcggttttagggctgtttttatggcaggcgatcaaggatcaaagcgttacagaatcaatacgtaggttttgcgcacggtttcctggatatcccagataccggtgctgttggccggcaacatcagtgcatcgccggcttctatgtgaaccacttcaccggtgtcgggggtgaaggtgcagcggccctggataaagtggcagaactcctgggatttgatttgccggcgccagcggcccggggtgcattcccagataccggtttcaacaccgtcggtgcgctcgacactcaaggtcgatgcaacggcgaccggctcaccgagggggacggccacgggtgacgagtccggcaggtgggcgttcagcgtgtctttgaattgagtgatgctcatgggttttcccgtgtgagtgaaacaagtcaatgcatgaaaccttccatgaacccggccacgccggtcgccagcttgcggcgccaagggccggtgttggggtctgccaacacctggtcttcatggacaaagctgcgaatgatcgcgttatagcccaaccagcggcacggctcgggctcccaggccttgagcgcgtcgaggccccgttctcggatgacccagggttgggtggtcaacggagtgtcgaggccgaggatcaagtcggccagggtgcggccgcccaggttggtggcacccacgccctctccgccataaccaccggacaacgcgatgccggtcttgtggtcgcacagcatatgcggccggaaattgcgcgacatgccgagattgccgccccaggaatgggtaatcctgaccttcttgagttgtgggaagagttcgccgaacaggtagcggcgcagttctacttcgctgtcggtcagatcaaagtcatggcgcaatcggcccgcaaactgatacccgccgcgagcgccaaacaccaggcggttgtctgccgaacgctggccgtaggtgacctggcggctgctttcaccaaacgcctggccatggctcaggccaatttcatcccaggtgcttgcgggcagcggttcagtggcgacgatcaagctttgtaccggcaactgataacggcccaacggcggcagcgtcgtggcgtagccttcgacggcaggcaccacccaggcggcgcgaacgctggcgttggccgtgcgcaggctgccggattgccaatgggtgaccgggctgttttcgtagatcgcgacacccatgctctccaccacccgcgccagcccccgcaccaacttggcggggttgatggttgcgacatggggtgcatagataccgccataaggcctggcgatgcggatctgctcagccaactgttgcgggctcagccagcgataatcgtcttcggtgaggccctgggcgtgaagtttgcccaggtagcggcgcaggctgccttcctgctcggggtaacgcgccgcgcaatacagggcaccgcctttgcggtagtcgcactcgatgccttcacgggccagcacttgagcgacttcatcgggaatgccgtgcagcaggtcataggaggcccggcgctgctcggggttgagcccggccagcaagcggtcttcgcccagcaggttgcccatcagccagccgccgttacgcccggaggcaccgaagccggcagtctgcgcctcgatgatcgcgattttcagctcgggcgcctggcgcttcaggtaatacgccgtccacaaaccggtgtaacccgcaccgacaatggccacgttgacgtccaggtcttgttccagggccggccgcgccagcagcgggtcgtccaactggtccatccataaactgatgttgcgccatgccggcatgccaagctcccaacccgatttcgataggctggatcctagtgcgcgctgtcaggggctgtcttgcgcgcgtgcacgcagggaaatttgtttgacataggccttgggcgactggcccgtgtgctggcggaacgcgctatagaatgccgacagggaattgaagccggcggcgaaggccaggtcgtcgactttgatcggcggtaacgccttgtccagtgccgcgagcaaatgctggagccgggcctggttgacgtagcgatagaagctttgccccagcacctggttcaacagataggaaatctggttgcggctgtagccacactccttggccacccgctgcaggtccagctccggatcgaggtaaggttgtttgagctggaaatactgctgcaggtcattggccatatgccccaattgctggggcgacaggcccaggcggctgaccgtagggcgcgtcgcctgggccggctgttcatgcaccagcgaggcatattcgttgacacgccaaatcagcccgtcgcgcacagtgatggcttcgctggtgcgaaacgacaccagcccctggccgccgcgcaaggtgatgcggtactggataaaggcggtatcaccgtcggcgcgaatgcggtctgtgtgttcgatcgcctcgtcggcaccccggggcatgctggcttgcaggtactcgcgcagctcggcgtaacccaccacacggttctggaagaaatcgtgatactggatatcggggtggtaataggacatcacgccgtccaggtcgcgatggcgccagcacaggtgatgacgcaagaccagctcgccggtggcttgggagtgttggcaatcatcggccggggcgatgtctggcatgtaagactctgagacggataaacggctgagattgccgaattttaccggcaccttcaatggccaatcgggacttctgactaatggccttttgcctaacttttaacagggcatgactcacatcaagttatcggaaaagaactgccgaacggaatgaaaaaactcaccttgggcttgcgaacggatgctattttgagtttcttcgatgccaagaccagtgaaggtcatggccctgccgcgagctaaaggaagcgctcaatgaaacaggtgggcaacatgaacaaagtgacgttccccaacgcttgccagctgatgcgctggcattttcatcctatgggcttcgaagggagcatggatgcccccggcagcatgatcgcccgtctgtttgaccgtgccagcggggagacgctgatcgccatcgccggtatcccctgcgcgacggtgatgaacgccgccgatgtggagcggatcatcgaggcggttgaggatgaattggaaagttttgtgccgccgctgtcgttgcgggcctgagcgccccgcaactcccagggaaacagcgctttttgtgggagctggcttgcctgcgatacaggcacctcggtgtatccgcttcacctcagggatgccatcgcaggcaagccagctcccacaaaagcctgtgcccacacaggcacagcgtttgggttctagcggcgctgatcatcaaaaaacgcttttttcccgtcaacccgctccgacgctctaggcacattcacgccctgaccctctggtttttccacataccaatagcagtggctcacggcccgggtaataccgacataggcgagacgcagcacctcgtctttttgcgcggtgtcatacggctcgctgtcaccgtcattgcccaagccggccatacgatagacctggttcttgtaaggcgagctggtgacgtgttggcaatccccaagcagaaaaaccgcgtccgcctgcaagcccttggcgctgtggtacgtcagttgcttcaaccggcgagacgctggcggcaagctagaatctgcattaactacagactgaatatgctcctgaatcaacaacttatcgctactttttcgataaagcatcaacaccgtctggcctttctgataatgctcaagcagcctgcggccaagcgctgactcatcacgttcgagcaccgccactggcaccaatgctctgggctcaccactggccttggcctttttgccggggatcgcaggcgcagcacgcacgatatgctcggcagcgtcgatgatgtgctgatggctgcggtaattctcagccagcatcacacgggtggtgctcggcgacacaaactccttgttgaacgccataaagtacttgggcgaactgccgcgccagccatagatggactgccaatcatcccccacacagagcaaggatgagcgctgtgccccccggcccacatgcatggccgggccacggctgcggatttcgcgaagactggcgcgaatccacgagacaatctgcggcgacacgtcctggaattcgtcgatcatcaggtgcgacatcggtcgcagcaaagggtcgctgagcaatttgaggttttccggggtgttttcgccgaacaacgagaacatacggttgtaagtcatgaccggtggcgactgatcgagcaggtggtcttccagggctttccagaaaatgctcagggcttcaaagaagaagcggtccgggtcgtccttggcgaacgtcatctggcccacggcgctgggcacatccagcccgaggttctcgataaagcccgcagccgtgacaaaactgtccagcaacggcgccgacgcgagttcgcccttaaccttgtaatcaaagccgggcccggctgctgcatcgccagccaggctgctcaaaaggcgctttgatgattcgtaactgtctatccatatcaatggcttacgacagaaagcttgaaacaaggtgcgcttgaccgcccactctgcacgtaccgacagctttgaattgggacggctgatttgcgcgttttcccgcggatcgaagcccagcaccacccaagcgtccagctccgggatatagccgtggcaatgaaactgcgcgccattgatctcgaaggtctggcggctcggctcaatgccctttatcggccaggcgccggcgcgaaaccacaggtcctcgatcacatcgcagagttcttcgtcgcgcttggccgccagttcagtcaccgcgatgcgtttttgcacatccggatggtcgcgctccagctccttgagctgcaggccatggcgcgccaacggcacgatcaattcacggaaccgctcatggcgggcatgcaagcggtgatagcaggcgttcatctgctggcgctgggcatcgctgatgcgcaggtcaaacgggttgctgtcggcgtcttcgaacccgctgctgaggttttcaaaggcctgcaatcgttcaaagcctggcaggctgcggaccatcggcagaatgcgcgagtgaaaggtgcgcaccacggcctgggcttctttgattccaaggggttggccccacaggccgagaatctccatgagcttgttgatgaaatccttgcgcgactcacgggtgaaggtcaccaccgtcatcgagctgagttcgaaacccaggtaatgggtcagcagcaggattcgcagcaccagcgaggtggacttgcctgcgccggcaccggcaatcactgaggtagagggggtgtcgctgaagatcatcttccattgcgcggcgcttggctgtgcctgcgccggcaacaaacgcgccacgtcagccttcatgcgttttttcatgtcgctggtcagcggcaggcgccagtcgtcgaacaggctgtcatccacgcccggcgcgcgatgctcgtcggggcgaaagtcgcgaatcagcaacacctgccggccttcctcgataccgtccgccttgccctcacgatagccatactccacgcccgcttcgtggccactgcgaaaaccgtcggcctgcccgtgcaaccaggaaaacctgtgctgcgcacgcaagcgggtcaaaccatggccaaacaaacgggcagccaggcgtttcaacagcggcatttctgccaggggaagcagttcagggggcaggtcaggcttttgttgcagcacgcggactccagcgatgaggatggttttggccaatgcgccatggtcgccggaatcggcgctgagttccagccaattactttcacgtcatacagttaggtgatgaagtgaaagtcaaagcgccacttatcaatcgaaataatggataagaatacggcaggttttgcgctttttatcgatcatccactgctggatcatggctccatccacaggagacgatcatgcttgaacttcgacctttcaacaccctgggcggcgcccaccatggctggcttgacgcccatcatcatttttccttcgccgagtaccacgaccccaagcgcctgcactggggcaacctgcgggtatggaatgacgacatcatcgcccccggcaccggctttccacagcacccgcaccgcgatatggaaatcatcacctacgtgcgcgaaggggctatcagccatgccgataacctgggcaacaaaggccgtaccgaggccggtgatgtacaggtgatgagcgcgggcaccgggattgcccacagcgagtacaacctggaaaccacgccgaccaagatcttccagatctggattatcccgaatgaggccggtttgccgccttcctggggtgccaagccgttcccgaaaggtaatcgcgaaggctttgtgacactggccagcggcaaggccggcgacagcgaaagcctgcgcattcgggctgatgcacgcctggtggcggccaacctgaaagccggggaaaatgccgagtatcggctggacagcggacgccgcgcgtatctggtacccgcgacgggagtgattgaagtcaatggcttgcgtgcgcaagcgcgtgatggtgtggcagttgaggatgagcaggtgttgcgggtgacggcgattgaggacagcgaaattgtcttggtcgacctggcctgacgctatcccaatgtgggagcgggcttgctcgcgaatgcgtactgccagtcactgaataggctgactgaaccactgcattcgcgagcaagcccgctcccacactttgttttgcggcgttactgagagatggcgccgtcgaccagcacctgcgcctcttccaccaactgtttgaggtgatcttcgccaataaagctctcggcgtagatcttgtagatgtcctcggtgcccgatggccgtgcggcgaaccagccgttttcagtcatcaccttcaagccgccaatcgcctggttgttgcccggcgcatggctgaggatctgctgaatgctttcgccagccagttgggtgttggtgacttgctccggtgacagcttgcccagcagggctttctgcgcaggcgtggctttggcgtcgacacgaaccgcgaacggttcgcccaaagcgtcggtcaggccacggtagatctggcttgggtcctggcccttgcgcgaggtcatttcggcggcgagcaaggccgggatcaggccgtccttgtcagtgctccacacgctgccgtctttgcgcaggaacgaagccccggcgctttcttcaccaccaaagcccagcgaaccttcaaacaggccatcggcgaaccacttgaagcccactggcacttcgtacagacgacgcccgatacgcgcggcgacgcggtcgatcagcccactgctgaccacggttttgcccacggccgcatcggcgcgccagtcaggacgattctggaacaggtaatcgatggacaccgccaggtagttgttcggcgccagcaggccgccggacggggtgacgatgccgtggcgatcgtggtccgggtcgcaggcgaaggcgacgtcgaaacgttccttaaggccgatgaggccctgcatggcgtagctggaagacgggtccatgcggatctggccgtcccagtccacgctcatgaagcggaaggtcgaatcgacttcggtgttcaccacgtccaggttcaagcggtaatgctcggcgatcgccgaccagtagcgcacccctgctccgcccagcggatcgacgcccaggcgcaagccagcgctgcggatggcgtccatgtcgatcacattgaccaggtcggccacgtagctgttgaggtaatcatggcggtgggtcgtgtcagccttgagcgcctgggcgtgggtcacgcgcttgacgccggccagcttgttggccagcagttcgttggctttggcttcgatccacttggtcacgtgggtgtcggccgggccgccgtttggcgggttgtatttgtagccaccgctttgaggcgggttgtgggacggcgtgatcacgatgccgtccgccaggccgctggtgcggccacggttgtagcagatgatggcgtgggaaatggccgggatcggcgtgtactcgtcgccttcggccagcatgacgtgtacgccattggccgccagcacttccagggcgctggcaccggccggcgtcgataacgcgtgggtgtccaggccaacaaacaatgggccgttgatgccttgggcttcacggtacagacaaatcgcctggctgatggcaagcacgtgccattcgttgaagctcagctcgaacgagctgccacggtgcccggaagtcccaaaggccacgcgttgggtggagatcgctgcatcaggctggccggtgtaataggccgtgaccagtcgcgggatatccaccagcaactgggctggcgctggcttgcccgcaaaaggactgattgtcatgcataaacctcgaaaagaagggtttggaaaaaacgacagtttactgagagttggactgctgcgcgacggtatcgatcccacattacaaagagaaatttcatacgttcaggctatctgcgcctggagtagcgcttcgctcaaggtcgccagggcaacctccagatcgggctgccccaggaatggatcgccaatacgcacgtgctggcggtgcagaccgctgacactgaacaactctcccggcgccacgacgatctggcgcgccagcaaatactggaacacctcatgcatatccacctcatgaacagcgcccagccaaaaagtcgcaccaccggccggcattcggtaagtgacctgcgcgcccacgtagtgctccaggcactggctcatttgcgctgcctgttcatgcaacaactggcgcaaggcgcgcaggtgccggtcgatacgcccgctgtgatacaggcgcgctatcgcccgctggcgaatggctgacaaacggaatgaacgcagcagaaactgacgctgcaattcgttgctcaagtgccgggacactacataaccatagggcgcttccgggccgagcactttctcgaacgaagaaaatacaaccacgcgctccgggttcatcaggtcacgcaacaagggatggggcgactggaaactcagctcggcacaggtatcgttttccagcaaccaacagccgtgcaggttaagtaaatgcgtcacttccatacggtcacgcgctgacatggcaacacctgacggctgactcaccgcggatgacagcaacaccagacgcaccggcttctcgcgcagcgtcctttcgagcgccgacaggtccacactgccatccggcgcccacccccactcaatgatgtgcacaccggcatcctgcaacaaccgcagtatcagccaatcgcagggcgactcgacgaccaccgtagcccccttgaggcccagcacgtcaatcaaaatatccagcaccccatgcaagtcggcgccgataaacacgtcgtcggcatgccagcagtgcgttggcgacgaggtataacgcgccgcgagcgctgcccgcagctcccatacgccgcagggctgagaccctggctgcgattgacgcgggtactggcgcaccaattcacgctccaatcgcaacagcgtaccgtccagtgatgccagcagcgtcggctcgtccccgctcagcaccaccatgcccgggcgccgggacgccacataaaggcgttcgagcaaatccccatccgggcatgccgaggcgtttcgggcaatcggccaggcgtaataacctgacttcgcaaccgaatacacccgcccctctttctcgaggagcgagtacgcatactggatcgtggaaatggatacattcaggcgcagggacagctggcgcaaggatggcagcttgactctgctgtcggtgctcacttcgttaatcaggttgatcatgtagcgatagacagtctggtaggcaaagcctgcctggcgcgccccctgcggcatcatcgcccagacggctggcaggccatttcacttgtggccatggggcgcccgccaggacggtgacgccggctattgaaggggccgtgggcaagcggacgtttgtgatacaggtgttgcagcagaggcagcggcaaaccgctggcgtcgttgagccattgctgcagcatctcggcggcaggcttgccctgcagcactttatgcagctcaggcagagcgaccagcatgcccgggtgacagtggcgcaggtagccttccagccgttcaccgtgatggatgaagggtgaaaacaagaggcagatgagctgcccctcatccagcccgaagaactgttgggcataattggctgacaacgcgcgcccctcacgactgactgcctgggtcaacaacgttgacggagcctgaagatgacgcaggtaggtttgcgcctgcatgaagagctcttcaacgcccgcttcgtactccagatcccgcaggcattcggcctgcaggcctcgcaggtgcgccgtcagcgacacaatggcgaagtccggttggctcagatgaaaacccagcgggtccggggcatgcaccatgaattcggtcagtaacgacgcacgtgcacggtcatctccctccagcaggtcggcgattccgatataggccaagtggcggtgagaacccgggctgacgtcggtcttaggcacaaaatgctcgccgtacaggtcctgcttgatttcgtcactccaatggcacatgcgtgcgaacaacccgttgagcgatgacagcttggctgtcggcggttgcacgcctgtggcttgagccatctttttcagccaggcaagaagctggctttgcttgcgcgcagaatcgccactgaccaccgcgtgcaccccgccgttccaggcggtgacacgctggaagaaatcacccaggctcaggtaagtgtcattgcacagtgttgcacgaatatcccccgatgccagatggcccaccatcaacatgttgcgctggctggtctcacgcccggcggcggatgccgggcgctggtgattgaagggcagcacttcattattttccaccatcagtaattcaacccggggatcatcatgaaagaagagccggccgtaaccacgatggagcatgtcgagggtagcctgggtcatgccggtgtgacgcaacgtagcgacccgcaactgaaatgtcctgggcgcccgccctgcgatggtcagttgggctgcacgcaacatcgccagcgtgtagctgctgacttctccgccgccatgtgtcaccagtattttgtaatcgcccacctgctccatgccgccggcagccacgacaatacgctggatcaataattgaagtgccgtgcgctctgcgcggctgaagtaaccaatcaagcgttgcagaacttgctggtaaacataattcatcgcttgttcgtgaatagcgctcatcattcgactacctgagttgtaatatcagtttcaagcaactgctgacagtatttgctcgttatattgcgccggtaagaatgtcgcagcgccacagtgctctaataatcagacactagcactttgcaacaatccggcacgggccaagggctgcgcagcccctgatgcgtcgtgctacgcacccggcgtaaaagctattgcagcgccagcacctaggaaggttccgacaacttcctacggtgctttaactctaatttcaaagatcgctccgacaaacaaaatcgccaaactttgatatttgcctttttatgatttgagacttcttctgaaagtatctgctttctcgtgcgcgtacgaatgcagcattaaaagctcctgaagaaacctgcaaccgtgttgggaaatcaatcattgctcaatccttgagatgaaagtgaagtcacaattatcgggacagaaatcctgattaacagacacagaagttggccaaaaaccagttcagataaacgtcagggagcctatcgatgatgcacacacgaaaacgccgcactgaaattcagggcggcgccaaggggaaaggtactttttactggccgaaacagcgccggggaacgtcaagcaacctgcagcttaagccctgtcaaatggcgcattcgccccatctgcacagggtttggaatactcgtttacgaatattcctacacgtcaaacagcttcaacctgcaacgcaacacgctcgcgacacgggcattcatccatataccggtgcgcttccacgaattgattgaacggaaacaccgtggttttcagcggtatgagcacacggtcggccgtcagttgattgatatcacgcaaggcgcgctgcaatgcaacctgatcctggatgatgcccagttccggtttaccggtgaagttaccgatgcagtgcacaaagaactgaatgttcttctggaacgccgcacaggccgggaacggtgtctggttaccgccctgcaaaccgtagagcaccaggctgccacggggcgccaatacatcaccaagcagcgacatctgcgggccgcccaagccgtcgaataccacgtcaacgccacggttatcggtgaacttgttgacctgcatcagcaagtcctgctcttcagtgacaatgactttttcggcccccagcgacagcaggtattcgcgttcggcgctgtctttggtcgcagcaatcacccgcgcgccaagggctttgcccaattgcacaaaggatgggcctgcgcagtggctggcgtcggtaaccagcgcaaactggccgggcttgaccctggccaggtcaacataggcaaagtaagcaatcagcaacggtgtgtagtgcacactggcttcaatcgggctcaagacatccgggtaccgggtcagggccgaacgcggcaggacgatctgctcgccatacaccggataatcattggggctctcggccggaaaactggccaccttatcgcccacggccagatcatccacaccgtcgccgagggcgacaaccacccccgccatctcatggccaaggccggacggcaagcgtgcatgggaagacgccaggttctggcgccacaaaatgtcgtaccagctgatgccaatcgcatcgacacgcacctgcacttcgcccggtgcaggctgcgcggctgcatgctcttcgcacttgagcacctcggccggaccaaacttgtgaaaacgaatcgtgcgggacatcgcaaacctcgtcaaagtaacctctaatgccatgaactctatctgggctttccgggtaagaccaccggtcgccgttaatagtcgacatgcctgtcattgattccgcaactgaggaacagacctcaagtgtcgtaggaaaactcaattatcttgtgcagagtaccagcctttccccgtaagattcatgctggtcatcgattctacgtggccgctctcgtcaagtttgctgactcttccaggacacaagatgaaccgtaacgacctgcgtcgtgtcgaccttaacctcttgatcgtattcgaaaccttgatgcatgagcgcagtgtgacccgcgccgccgagaagctattcctcggccagccggccatcagcgcggccctgtcgcgcctgcgcgggctgtttgatgatccgctgttcgtccgcaccgggcgcagcatggagccgtctgcgcgcgcggtggaaatcttcgccctgctctccccggccctggattcgatttccaccgccgtcagccgcgccgccgagttcgacccggcgaccagcaccgcggtgttccgtatcggcctgtccgacgacgtcgaattcgccctgctgccgcaactgctcaaacgcctgcgcgctgaagcgcctggcatcgtgctggtggtgcgtcgcgtcaactacatcctgatgccgggcctgctggcatccggagaaatctccatcggcgtcagctacaccgccgacctgccggccaacgccaaacgcaaggtactgcgccgcagcctgccgaaactgctgcgtgccgacagcgtgccgggctccttgagcctagatgatttctgcgcgcgcccccatgccctggtgtccttcgcgggcgacctgagcgggtttattgatgaagagctggaaaaactcgaccgcaaacgtcatgtcgtactggctgtgcctcagttcaacggcctgggcacattgctcgccggcaccgacattctggccaccgtgccggattatgcggccgacgcgctgacatctgcaggcggtttgcgtgctgaagacccgccgttgccggtgcgctcgtttgaactgcacatggcctggcgcggttcgcaggacaacgatccgggcgagcgctggttgcggtcgcggattcagatgttttttggcgaccccgatagcctctgaataaacctgcgcgctccccatcaaaccaatggccaaacccctcgacccgtataaatgagcgaatcggcaggctatttgatcggctgggtcaaaacgcgaacaggccgcctgcctagaatgagccctcacttatcacgccgggctcgaccatgaaactgagcagcactgccttcgccgacaacagccccatccctggcgaatacgccttcgccgtccccgatgcggccaatcactacgcgctctccagcaaccgcaacccccacctggcctgggccgatgtgccggcgggtacgcagtcatttgcagtggtgtgccacgacccggatgtgcccagtgtgggtgatgacgtgaatcaggaaggcaagcgcgtggccttcgacctgccccgtgtggacttttaccactggttgctgctcgatattcccgccggtgcccgtgaaatcagcgccggcagccacagcgcgagcatcaccgcccacggtaaaagcggcccgcacacggtcggcggcctgcgccatggcctgaatgactacagcgcctggtttgcgggcgacccgcagatggccggcgactactttggctacgacggtccttgcccaccgtggaacgatgagcgcctgcaccactatattttcacgctgtatgcactggacgttgcgcgcctggaggtacaaggtgcgctcaatggcgccgccgtgctggccgcgctgcaaggccacgttcttgcccaggccagcctggtcggcacgtataccctggcccccgaagagctgctcaacgttgactaaaccgctcaccgaactgcccgcccaatggttgctgccatcgggcgcgcggctgcaacctcaaggcgtgtgcagccttgcccggccgcagttgacgcgcgggcatcaggcgcgggactttcgattcttcgacgccacgttgctgctggtgacctgcggcgagctgttggtggaaaacgctgccgggcgctgggcgttggcagacgcctgcagcctcatggcagtggcaaaaaacacacaggtcaacgtgcacaaggcgcccgcccttgacggtgcgccctacactgcgttgttcctgactttttcttcggcgctgatcaccgagttccatcagcgttacggccacctgccggccccctcatccgccgtcgaaacgtgcaagcaagctgcgctggatgacgaactcaatgactccttgcaattctgtattcgcggtatcgagtcacctgacgtctcggcgctgcagcagacccaccgcgcactgggcttgctcctggccttgcacgaacgcggcattgtctaccctcgaccctctccggcaggccttgcagagcgcttgacccaactattggccaaaacgcccgagcacccctggacggccgcacttgcggggcgcgagttggcggtcagtgaagccacgctgcgtcgccggctggcgggtgaaggggtcagtttcagcacattgctgacggagatccgtatgcaccacgcgatgatgttgttgcagacgacccaccttggggtctcgcagattgcagatgcctgcgggtatcgggcgttgtcgaggttttcgatgcggttcaggcgccggttcgggctgtcggtgcaggatatgcggtgagcatagaggcggtccttgaaaagggcgcgcgccagccctcttgtcccccatatcttgagcccgctctaaccctcgcgggagacctggcttacccagtcctctctaagccccaccaaaatattcaacacattggagtaagccagaaacggcacagacagcggcacattggatgattcaaacctcacctccaaaggcaggtaaaaatccagcttgcctgagcgacccgcctgcgaaaacaacggcgcattcaagtggctggtgacactgaaaacatcaacaaagagaatcctggacagtggttctcttcccccaacggcaaacccgtcgatatagatgtccaactgcccatcttccaggtcggtggaaaatacgacctgcccttcttccgcatcaggatgaaagtgcccacggcccgccgcttccatgagattcatccttcttacaagagaccgccgaatcttcattttccagttccctttaaaacgcgctaagccatgttggacagcacagcggcccttatcaaccctaaacaggtcaaccccaaacaggcgggcagcccgcccatgcctcgcagagcaggcaacgttctttgccgtccgcgcaacagtctattgtcatcacgcccattgatagccccctaacgaaacccccatgctagaaggctaacctcgcgcttatatcattccgaatgatagttacctttgtttcattcgattcgtgacatagcacatcgccgcgcatgatccgcccatctcaaatacattggcggatgcacttcatggaacagtcactcaaacatttgcgcttccccttggcgattttggccgtggtggtgatgagcgcatgcggcaaagccccggagcaagcggccgccatgccccctgcgaaagtcagcgtggccaaggtgcttgaacaaccggtcaacgagtgggacgaattcaccggtcgcctggaagctccggaaaccgtgcagattcgtccgcgcgtgtcgggccagatcgatcaggtggccttcaccgaaggtgccttggtgaagaaaggcgacctgttgttccagatcgacccgcgcccgttccaggctgaagtgcgccgcctcgaagcccagctctcccagaccaaagccgccgccagccgcagcgataatgaagcgcaacgtggcgagcgcctgcgtcagagcaacgcgatctccgccgaactggccgattcgcgtaccaccgccgcccaggaagcccgcgcggctgtcgccgggatccaggcgcaactggacctggccaagttgaacctgagcttcacccgcgtaacgtcgccgatcagcggccgtgtcagccgtgccgaaatcaccgccggcaacctggtgaccgccgacacaaccccgctgaccagtgtggtctccaccgacaaggtctacgcctacttcgacgccgatgagcgcgtgtacctcaagtacaccgagctggcgcgtgaaggccgccgtggcgcaaccaccccggtgtacctgggcctgtccaacgaaaccggcaacccgcacctgggccagatgaactttgtcgacaaccaggtcaacccggccaccggcaccatccgtggtcgcgctgtgttcgataacagcaagggtgaatacaccccgggcctgtatgcacgcctcaaactggtcggcagcggcacctactccgccgtgctgatcaacgacgaagcggtcggcaccgaccttggcaaaaagttcgtgctggtgatggacggcgacaagccggcttatcgcgcggtggaactggggccgaagatcgaaggcctgcgcatcgtgcgcagcggcttgaacaaggacgacaccatcgtcgtgaagggcttgcagcgcattcgcccgggatcaccggttgcaccggaaaccatcccgatggccagcaaggaaaccctcgccgccttggcacaacaacgacaagcgcttgaagccagcaatctggagcaagtggcgccggaaaaaaccgcgcccaagctcgcagccgttgcgactccacgcggttaagggatacgactcaagatgaatttttccaagttcttcatttcgcggccgatcttcgcagcagtgctctcgctgctgatcctgatcgccggtgcgatctcgctgttcaagctgccgatcagcgaatacccggaagtggtgccgccgaccgtcgtggtacgtgccaacttccctggcgccaaccccaaagtcatcggtgaaaccgtggctgcccctttggagcaggccatcaccggcgtcgaaaacatgctgtacatgtcttcgcagtcgaccgccgatggcaagctgaccctcactattaccttcgcgctggggactgacctggacaacgcgcaggtacaggtgcagaaccgtgtgacgcggactcagcctaagctgcccgaggaagtgacgcgtattggtatcaccgtggacaaggcctctcccgacctgaccatggtggtgcacttgacctccccggacaagcgttacgacatgctctacctgtccaactatgccttgctcaacgtcaaagacgagctggcgcgtttgggcggtgtgggtgatgtgcagctattcggcatgggcgattactccctgcgcgtatggctggacccgaacaagactgcttcgcgcaacctgaccgccaccgatgtggtgaacgccatccgcgagcagaaccgccaagtggccgccggtgccttgggtgcacaacctgcaccgaatgccaccagtttccaattgtcgatcaacacccaggggcgtctggtcactgaggaagagttcgagaacatcatcattcgctccggcgacaacggtgaaatcacgcgtttgaaagacatcgcacgggtagagctgggttccagccaatacgccctgcgttcgttgctcaacaaccagccggcggtggcgattccgatcttccagcgcccgggttccaacgcgatcgagatctccaacgaagtgcgcgacaagatggcggagctgaaaaagagcttcccggaaggcatggacttcagcatcgtctatgacccgaccatcttcgtacgcggctccatcgaggcggtggttcacaccctgttcgaagcgttgatcctcgtagtattggtggtgatcctgttcctgcaaacctggcgcgcctcgatcattccgttggtggcggtgccggtatcgttgatcggtacgtttgcggtgatgcacctgtttggcttctcactcaacgcgctgtcgctgttcggcctggtactggcgatcggtatcgtggtggacgacgccatcgtggtggtggaaaacgtcgagcggaacatcgagctgggcctggaacccttcccggccactgaaaaggccatgagcgaagtgaccggcccgatcatcgcgactgcgttggtgctgtgtgcggtgttcatcccggctgcgttcatcagcggcttgaccgggcagttctacaagcagttcgccttgaccattgcgatctcgacggtgatttcggccttcaactcgctgaccttgtcccctgccctcgcggcggtattgctcaagggccacgatgcgccgaaggatggcttctcgcgcttcctcgacaagctgctgggtggctggttgttccgtccgttcaaccgcttcttcgtcaaagccagccacggttacgtcggcaccgttcgccgagtgattcgcggcagtggtatcgcgctgttcctgtacgccggcctgatggtcctgacctggctgggttttgcccacacgccaaccggtttcgtaccggcccaggacaagcaatacctggtggccttcgcccaattgccggacgccgcgagcctggaccgtaccgaagacgtaatcaagcgcatgtccgacatcgcgctgaagcaaccgggcgtggaaagcgccgtcgcattcccgggcctgtcgatcaacggtttcaccaacagcccgaacagcggcatcgtgttcgtgaccttgaagccattcgacgaacgtaaagacccgagcatgtccgccggtgcgattgccggtgcactcaacggcaaatacagcagcatccaggaagcctacatggcgatcttcccgccgccgccggtacagggcctggggacgatcggtggtttccgcctgcagatcgaagaccgtggcaacctgggttacgacgagctgtacaaagaaacccagaacatcatcaccaagagccgtaccacaccggagttgtttggcctgttcaccagctacacggtcaacgtgccccaggtcgatgctgccatcgaccgtgaaaaggccaagacccacggcgtggcgatcagcgacatcttcgacaccctgcagatctacctgggttcgctgtatgccaacgacttcaaccgctttggccgcacctaccaggtcaacgttcaagctgaacagcagttccgcctcgatgaagaccagatcggccagctgaaagtacgtaacaacaaaggcgagatgatcccgctggcgaccttcatcaaggtcagcgacacctcagggccagaccgcgtaatgcactacaacggctttatcacggctgaaatcaacggcaacgccgcaccgggctacagctccggccaagcccaggccgcgattgaaaagctgctgaaagacgaactgcccaacggcatgacctacgagtggactgacctgacctatcagcaaatcctctcgggcaacactgcgctgttcgtgttcccgctctgcgtactgctggcgttcctggtactggccgcccaatacgaaagctggagcctgccacttgcggtgatcctgatcgtaccgatgacgctgctgtcggccatcaccggggtaatcatctcgggcggcgacaacaacatcttcacccagatcggcctgatcgtactggtgggcctggcgtgcaagaacgcgattctgatcgtcgagttcgccaaggataaacagcaggaaggcctcgacccgctcgctgcggtactggaagcctgccgcctgcgtctgcggccgatcctgatgacctcgttcgccttcatcatgggtgtggtgccactggtgttgtccagcggtgccggtgccgagatgcgtcatgccatgggtgtggcggtgttctccgggatgatcggtgtgaccttcttcggtctgttgctgacgccagtgttctacgtactgatccgtcgctatgtcgaacgcagcgaagcgcgcaaagcggccaaggccttgaagctggagacacagcaatgagcgtaaaagtattcctgccgagcttgctggtactggcgttgagcgcctgtgccgtgggcccggactacaaaaccgaaaaactggaggcggccaacatcacggccgccgccgacaccaaaagctacgaccatgccaagtacgaaggcatctggtggcagcagtttgacgatccgacccttaaccagttggtcacccagtcgctgcaaggcaaccgcgatttgcgcgtggcgtttgcccgcttgcgggcagcccgtgccatccgtgacgacgtggccaccgacatcatgccggtcgtcaccactcgcgccagcagcgacgtgggcaagggccagatcccgggccagaccaccaagcgcgtgaacagcgagcgctacgacctgggcctggacatggcctgggaagtggatttgttcggccgtatccgccgcaacctggaagccagcgacgctgaccaacaagtagcggaagccgacttgtaccaactgcaagtcaccatgattgccgaactggtggacgcctacggccaactgcgcggcgctcaactgcgcgaacgcatcgccctggacaacctgaagaaccagcaggaatcgcgcaccatcaccgtcagcctgcgggatgccggcgtgggtgatcagcttgacgtggaacgcgccgatgcacgcctggccgccgttgaagccagcgtgccgcaactgcaagccgagcaagtgcgcgagcgtaaccgcatcgccaccctcctcggccagcgccctgacaaactgaccgtggacctgagccccaaagacctgccagcgattgccaaggcgttgccgattggcgacccggggcaactgctgcaacggcgcccggacatcctcagcgccgagcgcaaactggccgccgccaccgcgcgtatcggtgtggccaaggccgacctgttcccacgggtcagcctcagcgggttcctcggctttaccgccgggcgtggttcgcagattggttctgcagcggcgaatgcctggtctttgggcccgagcattacctgggcagcgtttgacctgggcagcgtgcgtgcgcggttacgcggcgccaacgcagaagctgacggcgctttagcgacttatgagcagcaagtgctgctggcgctggaagaatcggagaatgctttcagtgattacggcaaacgccagcagcgtctggtttcgctgatccgccagagtgagtccagccgtgcggcggctgatctggcggcgattcgttatcgcgaagggacggtggatttcctggtgctgcttgacgcgcagcgtgagcgcctggccgccgaagattcgcaggcccaggccgaagtggatttgtatcgcggcatcgtcgcgatctacaaggcgctggggggtggctggcagccggataccgtggtggccagcgccaagtgatgtaaagagctcctttggttggtcgcatccagccaatttttagccctgcggtccattcggtcgcggggctttttttcccccgctcaaatcattcggacactcaccgcttgactggccgctgatgcttgccattcatcgccactgtcaattctgacagtagatccaacccctgccccaagcgtttgattcaccttacccgtcgcgcggtgtccgcgcgctcactcagcaaggtgatgatgatgacaacgccaaccagccccggtgctgacgtaagcctggattcgcccgaagcgagctttgaagttcaactgggaagccgccctccaacccctgaagtggctgacagggggctgggtatccgtgggttggagccttacgccttgttctggtctgaagcgtggtttcgtatcgccatcggcgatgaatacacggtggtcgttaatgacagagaagtcgccacggatattgtcaggagcctgactaatcgttattcactgagggttgcctcaagcgacctgccggacggcgtggtcagggtctacttcaagatcaagcgcatcggcagcgggcaactaagtttctcgcccgtccagacgtatctaaacaagagacccaccccaggcggcattgaccgcatcgtgggtgaccagggccacagcggattgaacgtggtggctgaaaacctgccgcaattctcgtcgattggccccggtgttttagcaaccgggctggtggctctggtttcccgctatctgaacgaaagggtcaacgatgttattgccgtctacctggccggcgttcccaccgtcaagacgttgactgctgctgacatcgccacgcccgggccgtttcgcgtgcctgttgccccagcggtgatcgcgcagattgctgaagtccccgatgttgagctaatagtcacagtggtggatgtcgtcaataacccccccgccgggccggataagttctccgcaccttacatcttgtacaacggccttattcccggcctgtttttacctccactgttgctcatcaacaatttggacgtggatcgagtgaattggtctatccacggcactcagtcttttagcgtcgaagcggtacctgatcgaacaatacggcctgctataccggccaaccagatcgttgtgagggccatattcaccgacatgaacaatgtcaggcagccggtgagcctgccggcaaaagaccaccaaagcattcgcggcgagttagtcgatgggactccgctcaaggccttcctccttcaactggctcagaaagggggagggtttctcactctatggtttgaattgttcgaccccaccgggagacagattggaaggtcggggcgcaattcgtatccggtattggccgtgcagttgccgacgacctatccggcgccagaattcaacaatgtggcaggggctcaaaccgtcaacccgcagaactatccgaatggggccaacgtgagagtggcgttcgccaatatgaatgctgcgcaaacgatcaggctcagtgcggtccttgcaaatggcagctcagtcgttttgggcacggtgacagggtcgagcaccggcgctgtgtctttgctcttcagcgcacagctcctcacccaagccgccggccaactggtcaagctgagttatgaggtgacggagggaggcattacaacaccatcgcttgctcaggaactgaccgttcaagcacagagcggtggagtgagcaaaacggttgccgtgggcttggggccgcacgccgtcagtgtcacccgagatgggcgaaaggcctttgtaccgtgccgggacagcaattcgatttcagtgattgataccctcacggggcaggtcatcacgaccattttcggggtgtcgtctccttttgcatcggtattgagcccggatgatagccgcttgtatgtcggcagttttcttggcgggagctactacgttatcagtacgacgacctatcaggtcctcaagaccgttccgctcacgggtggcggcaatgtatcggggctcgcacttactgcagatggtgctcgattgtttgtggcctgcaccaacaccggcgtcgtgcatgtctatctcacggcaacggataccaacattaaccgtatccccacggccagtgcgccctttggtttgacggtcaacccggagcaaacccaggtctggatcgcctttcaatcggcggtggggattatcaatgccaatggctatggcggccttttggcaaaaatcccggggttcggtagaacagtgcatatcgcgttcaatccgggtaaccagcctgtcgctcgcgcctatgttgctgacgagagtggtatttctgtagtcaaccctctgacaaacgccattgccggcaagataacggcccctaacgcttggggcgttgcgatcaatccgaatgctccagaactctgggtgtcaggcagtgacccaggcgcagtaggcgcatcggcctatcgcagttcggtttacgttatcgacaccaatacgctgcaagtcaccaaacgccacacgggcttcggcaacgcggcaaatatggcctttgtgcccaattcacgggtgacgcttgtcgccaaccaagcgacagggcaagtgagctttgttccaacataagggccaaacctgaaaggttgacgggacagcgccattaaccctgggctgtccctttttttgcccgaatgttcacccggcctcgttgagaatcaaactgcgataatgccccggattcgaccccgaccatttgcgaaacgccttgtaaaacgaactcgcatcggcaaatcccaagcgcgccgcaatttcggcaaagctaatgtgcggttccgccagccacacaatcgccaactccttgcgcacgctgtccttgagcccctgataggtctgcccttcctctgccaaccggcgacgcaacgtcgacgcggaaatgcataaggaggccgcgagcccctcggtttccggccaggtctcggccggcagttggcgcaaatcgtgtttgatccgcgttgccaggctttgcgggtcgcggtatttcaccagaatgttggccggtgcatgggccagaaaccgcttcaactcctctgcactgcgcttgatcggcaggtcaaggcagtcggcagagaagatcatccgcgtacgcggccggtcaaagcgcaggttgtcggaaaacatcacccggtagtcatcacagaaatccggctgcgggcagcgcagctcgatggccaggatcggaatgcgccgccctgccagccagcacgccacgccgtgaacaatcatccagtaggcaaagtaggtgaatgcgcgccggggcggcacctcgggctccagcagcacgatttccgccaggctctgctggcgtaccagttgtgcaggcagttggtcgagcattaatgacataaactgcaggcccgtttgaaggctggcgcccagattcggctgggccatggcgctatgacacagaaactcgaagctaccggacttgagcttgcgcgggtccatgccgaaaaactcatcgtccaggcgcctcgccaacagacgccacaaacgcgcatacgccgtggccggcacgcgcgcatcgggctgcgcgagcaacgccgggtcaatgccggccttgttcagggcttcaagtgtcggagcgccgggcgcgcagctctgcaacagggcttcgcgcaccaagtggatggaaatggtgtctttttccgccatgggaagtcggctattgagctctacataaacatggcatgcatcataagggcggttgcgattcgccaccaccgttcagcagcagttcagcaaaggtcaacattcactgtttagtaatgagtatcattatgttacaaattagcatcctatccagtcttgatgcggtgctgaatgcttgttccctttttaatcatgctgcgcgaaggcattgaagcggcattgatcgttggcatcatcgccagttacctgcaacagaccggccgcggccagtggatgcccgccgtgtggatcggcgtattcctagccgccgccctggccctgctggtcggtggtggcctggaattggtcagcgccgaattcccgcaaaaacaacaggaactcttcgaaggtgtggtcggcctggtggccgtgggcatcctcagttccatggtgttctggatgcgcaaggtggcgcggtccatcaagcatgccctgcacgaatccctcgaccacgcgttggccggctccaaacatcaggtgatcgcactgattgccatggtgtttttcgccgtggcccgtgaaggcctggaaactgtgtttttcctgctcgccgtgttccagcaaagcgaaggccccggcgcgccgattggcgccctgctcggcctgatcctggccatagtggtcggtttcctgatctattccggcagcatgcgcctgaacctcggcgcgttcttccgctggaccggcctgttcatcctggtggtggctgccggcattctcgccaactcggtgcaggccttgcacgaagccggcgtgtggaaccacctgcaaaccgtgctgttcgatttcagcgccgtgttgccgatggacagcccgctgggctcggtattggccgggatgttcggctaccaggaagcgccgaccgtaagcaccctgggtgcctatctgatttacctggtagtggccctggtgatgttcttcctgccctcggcccccgccaagcctgtcgccaaaccttcttccgcttccagccagtaaggaccgtctcttgtccaacccaacccctcaacccgctccaccatcgcgcgccttgcgctgggcggtggccgggtcggtggtcgtgatgatcgccgccggtgcactgttctattacgcctcgcagttggctgccgccaagcgccagaccaaccacaatgaaatcgccgtgaccattcatgctcacgcctgcgagcccaacgaactgaccgtgcccgccgggcgcgcgagctttcgcatcatcaaccgttccgaccgcgcggtggaatgggaaatcctcgacggcgtactggtgattgaagagcgcgaaaacatcgccccgggcttgagccaggtgatcaacgccaacctgttgcccggcgattacgcaatcacctgcgggctgctgagcaacccgcgtggcaccctgcatgtgacgccgaccgcggagtccgacgcccaggccaaggccaagccgtcgatggtggcgtttatcggcccgctgtcggagttccgtgtgtacctgagcggccagggcagcgccctggtcaaggctgcgagcgcgctgcaaaacgctatcgactccggtgacctggcccaggcccaggcgctttacgtgccggcccgtgaggcctaccagcggctggcgccggcatcgcagcgtctggccgagctggacaacgccattaatgcccgcgcggattacttcgaaaagcgcgagcaggacccggccttcagcggcttccaccgcatcgaatacagtctgttccaacagcgcagccttgatggcctgagcccggtcgcccagcgcctggtcagcgacgtcacctccctcaagcaacagttgctgtcgcagtcgctgccaccggaacaactggtgagcattgtggtgcgtaacctcaacagcctcgccgacgtgcgcgcggccagcggtgaagaagagcgctacagccatatcgacttgaacggctttgccgccaacctggaagtcgcgcacaaagtggtcgagctgatgcgtcctttgctgaccaagtccgccgccgacctgctgccgaaaatcgacagcgccctcagtgctttcgatgccgaactcaatggtttgaaggtcaataacagttacagcacgtacgacagcgttaccgccgatcagcgcaagcagatcgccgacaaggccaaggctctggccgttgcactcgatggaatcgaccccgcccttggcctttccggcctgcagtgaagacgaccgcacagatgagcgattcagaacacaccaaccttcagcgccgccgtgtcctgctgggcatggccgccaccggcgcggcaatcgccggcagcaccctgacctgcccggccatggccgccgccgccgaacaggtcaccaccgcaccgcgcagtgacaagacccaggaccaccacgactttttcggcaagcaccagaccggcatcgtcacgccgcgccccgcctgcggcatgctcgtggcgttcgatgtgctcgccagtgaccgtgaagacctggagcgcctgttccgcaccctgaacgagcgcatcagctttctgatgaccggcggcaccgtgccgcaagtcgacccaaagctgccgcccaccgactccggcatcctcggcccgatcgtcacgccggacaacctgaccatcaccgtgtcggtcggcgagtcgctgttcgacgagcgcttcggcctcaccgccgccaaacccaagcgtttgagccgcatggtcggctttcccaatgacgcactggaaccggcgcagtgccacggcgacctgagcctgcaattttcgtccaacaccccggacaccaatattcacgccctgcgcgacatcgtgaagaacctgccggacctgctgctggtgcgctggaagcaagaaggcagtgtgccgccccaggccccggccaaaccgggcgagccggcgcaaagtgcccgcaatttcctcggtttccgtgacggttcggccaacccgaactccaccgacgacaaagccatggaccagattgtctgggtgcaaccgggcagcgacgagcccgcctgggctgcaaacggcagctaccaggccgtgcgcatcatccgcaacttcgtcgagcgctgggaccgtaccccgctgcaagagcaggaaagcatcatcggccgtgtcaaaccgaccggcgcgcccatggatggtgaaaaggaaacccaggttcccgactacagcaaggacccggaaggcaagttgaccaagctcgatgcccacatccgcctggccaacccgcgcaccccgcagacccaggccaacctgattctgcgccggccgttcaactactccaacggcgtcaacaaaaacggtcagctggacatggggctgttgttcatctgctaccaggctgacctggagaaaggttttatcagcgtgcaaacccggctcaacggcgagcctctggaggaatacctcaagccggtcggcggcgggtatttcttcaccttgccgggggtcaccgggcccaaggatttcctggggcgcacgctactcgctgcaacgcactcccaaaccactgccaaagcttaaataaaacacacctcagagcggataccgtcccatgaagaagtcgactattgcgttgtcgttgttaatgaccctttcgccgctggcagccttcgccgctaccgcgccgctggacctggtaggcccggtttcggactacaagatctacgtgaccgaagaaatcggcgaactggtcacccagaccaaagcgttcaccgacgccatcaacaaaggcgatctggccaccgcgcagaagctctacgcaccgacccgtgttcactatgagtccatcgagccgatcgccgagctgttcagcgacctcgacgcctctatcgattcgcgcgtcgacgaccacgaaaaaggcgtgaccgccgaagacttcaccggcttccaccgcatcgaatacgtgctgttctccgagaagaccaccaaaggtctggaaacactgaccgccaagctcaacagcgacgtcaacgacttgaagacccgcgttgacggcctgaccttcccgccggagaaagtcgtcggcggcgccgcagccttgctggaagaagtcgcggccaccaagatctcgggtgaagaagaccgttacagccacaccgacctgtatgacttccagggcaacatcgacggcgcgaagaaaattgtcgacctgttccgtggccagatcgaaaaacaagacaaggccttcctggccaaggtcgacaagaactttgcgaccgtggacaagattctggccaagtacaaaaccaaggatggcggctacgagacctatgacaaggtcaaggaaaacgaccgcaaggccttggtcggcccggtcaacaccctggctgaagacctgtcgaccctgcgcggcaagctgggtttgaactgataaaaaagccccggccatgcgctcatgcatggccggggctttcaggcgccggattttgcccttccagtgggcaggcagggccgcttacttgaagtcaggtaacggcgtgccatccgcttgccccgttttggggttgatcgcataccagaagttattgattttggcggcctctaccgcaactccctggctggtgccggccacgttcggttgctgaggttttggggctggatcgaacccgccggccatccagaaggccctcgccttctcttcaacggtgagcagattcgccgctatcttggtcagagtcggttttcttgtggcttgatgttgaagattcagtgtcccttttatagccgaactcaccagatccgaatagccggatgcgggattgaataccgcattggcgaacaacgccgagtccttcgtaaagttgaaggccctgtcgcttaagctcgccacaggctcagcccatgcaattttgggtgtgagagaagcgactttgtttcccagcttgccaatggcgctgctcaatgggttgggcctgagcatcttgaatgaacgcaatagtgaccgagcctggctgccggcaccgagggcccccccgagcacgtccagtcccagggcgaataacccgctgccaatgttaccgtcggcaaactcctgataagcacctataaagggtatgagccccttcaagattttcttttcatgttcaaggacctcacgtttctcttccaggggcaatttttcattggcccttttggtcatcgactcgtcgctttcgtataaatttttctcggcaatctgcgccgcgatgcggccgattttctccgatgcaaacacgtcaacccgatcagcgctctgtgcaccatcgttggctgacatctcaccgcgaaccggctcgccgagttgttcaacgatcacactggatgtgatattcggcctgggagacgtgcctttcgaataggcttcaaaatccacattaaggtcgaaccccttcgtatagctctccggattgcgtaccctccaactcggcggagcgcgccggccaccaagaacatcccccagtttcaatgttgcagggaggtcggtgcgtttaaccattttcccacccgcaaacacttcgaaatagcacacctgctttcctagttcgaccctcatcaacgtgccgtgccgccccctgaaccgatccagattcacgccggcttgtttcgcaggcgttagcccggtttcgcctctcaagctgaacaagctcaccacactcttggggttgttcagcagttggcggtcggccaatgggagtttggtgaacataagtttaagctcagttgcgtacgctttcttaagcgcagcaacgtgctctttaacggcgcgcgccacaataggatttaaatcaggcagtttacgaatgcgctcatcgagttcagcacgcttctcggtgggcgcctcgatttccaggttctgttgaaacgggctctttctagggcgcaggaggttttccggcatgtcgctcctgagtacccacttgccaggcgtcagatcacccgtcatgtaggtttctacgatcgaacgtatacgcggctctgaaatagacgtgttgcgccgagcgttggggtcagccatcaacacttgcatcccttccagttcgctgcgcgtgacgcccgggaataccttgagcaattccctgattgcaaaagccctgcgcgacggtagcagagtgaccgcgttcatggcgtcgttgacctctttacgctgcttgaagaacgcttcgctggcggtcttgatcgccgacggtgaatgcgctccccccactgcagcggaaatgacgccattgagcaccgcccattccaacaagatcctgatacccctcaattgcatcaaggttgcctgcgcttcgtgtgtgggggccagcgtcgtcagatcactgacctgcgtttcgttcatgacgcggctggtacctggcgcaccgagctccgccatctcgcatcccaggcgcagttccgcccaggccggtgtgccgatcacgatttctttgggcacgtcccgcacgagaaactcgggcgctgcctgagccaggcggatctgggccaccagcaccgcaagctttggatcaaggccccgtttctgctgcaggtgctgctccagctcccggcgtaccgcgtcgaaggtgcgtcccatattctccggcttatagaggctatagccggcaatgtggcccggcattgccggtacgtcctgcccggcgtgcagggtcagcgcggcgacggtcaattgttggcaaaccgtgtcgggcacaggcgaaccgtgccagttcaagacattggccaactgatcacccaggttcagcgccttggcactgccaagcaagttttccaggtgctcggccgggttctgctgcaagacctgcaaggaggtgttattcaggtagtcaaactgtagaggagccttgcccgtcaaacgcttgtcaatctcggtcttgagggtgactttatcggcggacgtcaatttgccgggggcccacggttgctccagaaggtcggagtaattgcccaaaggcggtgccggaggcaatgcgctgcgtaaccagcgagcaacattgcgcgcctcgccggccgttcggggcgagcccaaccctttttgatccacgagctgacgggcgtcgtaggcatgcaccgagtacagtgcgttaccactggctttgctgagctcgaccaaccggataaactcggcgctcaagctgcgaacacccgtgaggtagcgggtaacgtccagccattttccattcggggcttggtgttcgagttttccctcagacacccgaaatggctgcccacgccaaaatacgccgtgctcttccagtcgggtgtgcaaggtggaggattcggtgaaccgttgcaggcgctctcgcgcaaaatgatcgcccgtgaccatcgcggaatctgccgagggttgcgctgagtgctccgacccgttccaaggcttgtcgtcaggctcacccttgacctgactctccaaatagtcagccaggtaggcgcgttcatccaggtcaccgattctttgccgcgctagcgccacgccgctactgattcgctggtactggtcggccggcattgccagcccggcgggatgctgttggttcaccttgtgcatccaatcgtctttgcgcgaaggtgctggcaaaccataagcctgcgccaccaccgaagtgggcacccaggcctcattcttttccaggtaataaatacccgcatctgcagggtccagaacgtccctgaccatgcgcagcttcgcgctgaccggccaccaaccggaatcgtcggaggtattgaaggtcaccgccgtgcgcacccccttctcgttgatataaccgctgatgctgtctttatgcagcttcagcccttccttctccaggcccttgctttcgaaccaggcttgcagctccggctgcgccaggacctgtcggtaagcgtcgagtgccgctgccattgacgagccctgtgggacgtttacgagggaagagccattgcggaccgcgttgaacagttgttgcccaaacgctctgtcgacagactgacgatccgggttttccggccgcgacgcaggtaaggtccggcggggcgaggacgccggcaggttgttggcaagctggccggcggccgcgtaaatttgggccggtgtatcggggctctccacgccggaaaacaacaggaattgacgcgcatcgtacatagggcgcgagtacagggtgttcccggtagacttacacatatccacgagttgtttgaacccggaatccaggacctcaatcgcagacttttcttcccgccctccgcccgccctgaccttgctgatctcatccttcagaaacgcctccagagagatccactgatgcttgctgtcacgtacttcaagggcgccctcgaacaccctgtaaacctggtcagtgccgccatagccaaccttctcaatgaatgttttgaacgtcggcatcgacagccaggcagcaaagcgctcacgggattgctgactgttttgcgccaatgtcgattcaggctcaaccaccacaagctggtcgcccaggttgaatacctcctgccctcttgccgccttgatcaggttcagcaattggcgcgccacgtctgaccgggcatcgatgtcgctggttttttgatagagttgctccaactgctggtgccatagcctgcgttttgaatccgttatcgtcggccaaccggccgactggcggtactgaccaagcagcgttctatctttgtcggtgggagggagtttcacaccgtaaaacataaaaaccacgcccaggtcaaaaagccgccctgtttttttatcgggcagtaacactccggcagatttgggggacagcgcgttcgccgcctcagtcaatttagccccaaccttgttccaacccgatccgtcggtggtggtgaacctgcgctgaacctttacaccatcgaccactaccgtgccttccaccccatcactgaaaacgcgcactgacgaagcgtccaggccattggccttgaaccaggcccgaacctgtcgttcctgtgccgcactgttaaacacgtcaaggaagggctggaccgaggcatgccgaggaatggggttgcttttcatctcaccggccagcagccagtcagtgagggcttgctgcaacttttcatcagcccgctttgcctctgaatcttgcgcaaattccggacttttgggctcagtcacggccaatcggccggtgttgcccgaggcgatttcacgcttgggacgggccctgcctgattcaagcctggcttgcctcagttgcccgtcctgtcgacggggggcgtatgcagggctggcgctttgagtttcgccggagctgccctgaggcggtggcgcaagcggcggattacgaggttcgacggcaacagggctggccgttgcgacgattgagggagtggtagtgcgattgactgcaaatgtcgacatagcaagctctcttcacgttggacgctagagttcttgtccctaagaacagtcaacaaaacctaagagaaattacaaagggattctgtaggagagttctcaatgtttcggctatgtgcacgcaccataaggcggcgggtccagcgtctgtgcttttacaaaatgcggtaaagcaaccgctcaatacgcacccggctgacccgccgcaggaacttgccgaccgctggcggataatccaccagcgtctgcagctgttggtagccctcgatacgcttggtgtgctggaaaatctgcgccagctcggtgcgccgcggccccagccattgcccctgcgggtcatcgatcagcaggccattttccaggtccaggcggaacgcgcgcgggttgaggttgttcccggtcagcaaggtgtagcgctggtcaacccacatgcctttgaggtgataggagttgtcgccatcacgccacaggtgcaggttcagctgaccactgtcgatcgccggttgatggcgcttggcgaagcgccgcaagctgatttcatacagataaggcaatgccgagatcaccttgaacggctcgctgggcggaatgtagaaatcgttggcggttttgtcgccgacgatgatgtcgaccttcaccccgcgcgccagcgcccggttgatttcccgggtcaccggcaacggcaggttgaaatacggcgtgcaaatggtcagctgatgctgggcgctggcgatcaattccagaatcacccggttcagcgggttgttcttgcccacaccgagcaacgggctgacggccaggtggccattgggcaactgccctgccgtggtgtcgtaggccgcatgcttcaggcggctgcgcaggtcgccgatgtcgttacgcaggctacgggtggtgggcgggttcggcaggtccaggcggtgtaccgccttggaggccacaagcccatgctcgatcagatgttgcatcgaatccgccagcggctggctgtggatcaggtgataacggtcaaaccggtatttgtcgaacttgtgcaggtacacattgttcaggcttgcgccgctgtaaagcacgctgtcatcgatcacaaaccccttgaggtgcagcacgccaaacagctcgcgggtctgtaccggcacgccgtacaccggcacttcgctgttgtgggactgggtcatggcctgataccaggcactgttgccgggttgcttgccggcgccgatcagaccgcgctgggcacgcaaccagtcgaccactaccacgatgtccaacgctggccgtgcggccttggccgcgtgcaaggcgtcgtaaatctcctgccccgcctcgtcctgctgcaaatacagcgcgacgatgtagatacgccgcgtggcctgggggattttctccagcaggcagcgccggaacgcatcggcgccggacagcacgtcaatggcgtcgctggagagaggaaaaccgcgcagtttgggcaacagagagcgtttgaagaacgacggcataaggctcgcaatgggtcgaatccgaagaggccccgagcttacaccatgggggtgccgaggtctcgctgttacagatggaaaaattttaattgaccatggagaacggtcgttctactgtgcaatacatgaacgacatgacccataatgaaacccgcgacatcatcctcgacgtcaccgaaaagttgatctatcgccacggcatcgccgccaccggcatggacttcctggtgaaaaccgccggtgtttcgcgcaaaagcatttaccgctatttcgccaataaagatgagctggtgatagccgccctgcaacgccgtgatgaacgctggatgcagtggctgcgcactgaagtagaacgcagcgagggcagcggtgaacgtctgctggcgctattcagcgcactgaaaaactggttcggctcggcggattttcgtggctgcgcctttatcaacaccagtggtgaaaccggcgatgcgcaagacccggtacgcctgctggccaaggcgcacaaacagaaactgttcgactacgcgctcgaactgtgtgaagcacatggcacccccgacccgcagcggcaggccgcgcaactgctgatcctgatcgatggcgccattacggttgctttggtaatgggtgattcaacggctgccgataatgcgcaatgcatggcgcgaacgttattggaactttgaacgcattcaacttgcaactttcgattaaacctcattgtgttaaggagctgccgaatgacctcgacaacagaaactcgcccgccactgccgccgtttacccgcgaaacggcgattgaaaaagtgcgcttggccgaagatggctggaactcacgtgacccgcaacgcgtgtctctggcgtataccctggacacgcaatggcgtaatcgcgccgagttcgtgcacagccgcgaagaagccaaggggtttctcacccgcaaatgggccaaggagctggattaccggctgatcaaggagttgtgggcattcaccgacaaccgcattgccgtccgttatgcctacgagtggcatgacgactcgggcaactggttccgctcttacggtaacgagaactgggagtttgacgagaatggcttgatggcgaatcgctttgcctgcatcaacgacctgcccatcaaggaaagcgagcgcaagttccactggccgctggggcgacgcccggatgatcatccggggctgtcaaatctggggttataagagcggcttgatcaaacggtgggagctggctcgcctgctcccacactttcggtgctcttcagtcctgattcagacctacgcgatacaacgttcccttgtcttcatccgtcagcacatacagataaccatccggcccctgacgcacatcgcggatccgcgccttcaagtcgccaagcagacgttcttcatggatcaccttgtcgccgtcgaactgcaggcgaatcaactcctggctggccaaggcaccgataaacaggttgtgttgccacggcttgaagcggtcggcgtcataaaacgccatgccactgatgcccggggacttttcccagacgtgatgcggcgccaccgtgccgtccgccaccttgcccttcgcctctggaatgggcgtcagggaatagttgatgccgtgggtggcgagcggccaaccgtagtttttgccgcgctcgatgatattgatttcatcgccgccacgcgggccgtgttcatgttcccagatcgtgccactccaggggttcagcgccagcccttgcgggttgcgctggccgtaggaccagatttcgggacgcacgcctggctggcccacaaaggggttgtcgtccggcacgcggccgtccgggaaaatccgcaccaccttgccttgcagtttgtccagatcttgggcagtcgggcggtcgttgttttcgccaagggttacaaacagataaccgtcacggtcaaacgccaggcgcgagccgaaatggttgccggtggagagtttcggctcctggcgcaggatcactttgaaatccttcaacccgctcaggtcatcggccaaccgccctcgccccaccgcagtgcctgcggtgccacccttgcccccgccctcggcgtacgacaggtagaccatgcgatcctgcttgaagtcgggcgacagcaccacatcgagcaagccgccctgccctttggcccacacgtcgggcacacccgtcagcggcgcagacagcttaccgtccgggctgacgaaccgcaggtggcccggacgctccgtgaccaggaaaccctgtttgtcgggcagaaacgcgactgcccacggatggtccaggccccgggcaaccggcgtggcggtgatgctgccttgttcactgggaaactgctgggcgtcggcggcataaaccgccgacaaaggaaaaatgacagaggcgcacagtgcggccaacagggttttgcgtgcaaacataatacagagtccttaccggcgattgccgttggcatcataggtgggcgctttggtttcggtcgcggggcggcttggggttgcatcgcgctttggatagcggttgccgatgccgccgttttctactgtaggagccgggctggtcggcccggtctggatcccgcgagtggccggcgcattgggctgggtgccctgcatgctgttggggttggcccgatggatagggctgttgttggagtcgctacggccaggcaagctttgcgcctgggccaatggcatgagtaccaggcccaacgccagcactgcaaggtgacgcacacagctgttcatgacatagcctctcgaggacaaggagtacgtgctttcgataacacgctacgccttgggttcggcctgcgacactaaatagtttctcatcaggtgtaacacgatctgtccgcgcatctgccggccgaaacttttgccgccgcccgcgggtcacctgaacacaggctcttctcaaggaatcgcaggtatgccacgggcaatttggaaaggcgcgatcagcttcggcttggtccatatcccggtttcactggtgtcggccacgtcctcccaaggcgtcgactttgactggctggacaagcgcagcctggaccccgtgggctataaacgcgtcaacaaaaagaccggcaaggaagtcaccaaggacaacatcgtcaagggcgtggccctggaaaaaggccgctatgtggtgctcagcgaagaggaaatccgctcagcgcatcccaaatccacccagaccatcgaaatcatcgcatttgtcgacagcgagcagatccccctgcaaaacatcgacacgccctacttcctcgccccggacaaacgcggcggcaaggtctatgccctgctgcgcgaaaccctcaggaaaacccgcaaggtcgccctggccaatgtggtgctgcacaccaaacagcatctggcggcgctcatggcgctggaatcggccctggtgctggtcatgctgcgatggcccgccgaagtgcgcagcctcgacgagttggcgttgggcaccgacgtcactaagccctccctcgccaagggcgaactggacatggccaagcgcctcgttgacgacatgagtgccgactggcagcccgacgattaccgcgacagtttccaggaaaaaatcatggcgctggtgaagaagaaggccaaggccggcaagattaaagacgtggaaaccagccaaggcagcgaagcgcgtcaatcagcggacgtgatcgacctgacggagctgctcaagcgcagcctggcgggcaagcccgccagaaaacctgccgcgaagaaatccaccaaggcctcctgagccggggaaacctccatgcccaagcccttgagcgaatacaaccgaaaacgcgatttcaagatcaccgcagaacctgcgggcaaagcacccggcgccaggcgcaagacttcggccttgacgtttgtgatccagaaacacgacgcacgcaacctgcactatgactttcgcctggaactggacggcgtcctcaaaagctgggcggtgcccaaaggcccaagcctggacccggcccagaaacgcctggcggtgcacgtcgaggaccaccctttgagctatggcaatttcgaaggcagtatcgcgcccggccaatatggcgccggtgacgtgatcgtgtgggaccgtggcgtgtggcagcctcatgaggagccacacaaggcctacgccgccggcaaactcaaattcaccctgattggcgaaaaactctccggcgactgggcgttggtccgcacgcgcctcaagggcagcggcgacaaggaacaatggctgctgatcaaggaaaaagatcagcaagcccggcctgctgccgactacgacatcgtcacggcagagcccaaaagcgtgttaagcgacgccactgtcggcaaacccaaggcgcgtgcaaaaccgggcaaagccttcgcgcccctccccgagcagctcacgccacaactggccacgctggtcgaccaggcaccggacggtgattggcaatacgagatcaagtttgacggctatcgcatgctcgcgcgcatcaaagccggtgaagtgcgcctgttcacgcgcaacggccatgactggaccgagcgcctgccgcgccaggtcaaagcgctgcaagcgctcaagctcaaggacagctggctggatggcgaagtcgtcagcctcgacggtgaaggcttgccggactttcaggcgctgcaaaatgcctttgatctcgggcgtagcctggacattgtgtattacctgttcgatgcgccttttctcgacgggcaggatcagcgtgaagaacccgtgcaagcacgtcgtgcagcgctcaagtcggtactgtccggtagccggagcagattgctgcggttttccgaagccttcgtggccaacccgcgcgacatcattgaaagcgcctgcgacctggccctcgaaggcgtgattggcaaacgtgtgggcagcccttatgcctccacccgcaacaccgactggatcaaactcaagtgccgtttgcgccaggaattcgtcatcgttggctacacacgcccgaagggctcacgcagcggatttggcgccttgttgctcgcggtgaatgacgataccgggcttgtgtatgccgggcgcgtgggcaccgggtttgatcaggcctcgcttgaaaccctccatgcccggctgcagccgctggcgcgcaaaacctcccccctggaaaaaccactgacccgtggccaggctcgggaggtgcactgggtcgagccgcgcctggtcggcgaagtgcattttgccgaatggacccgcgagggtgtggtgcgccaggcgtcgtttatcgcattacgcaccgacaagccggtatcgcagatcattcatgaacaaccgcgcacggccaagtcgctcaagcccgcgaaagccagcagcggtgtgaacatcacccaccctgatcgtgtgatcgacccgcaaagcggtacacaaaaacagcagctggctgcgttctatgcgggtatcagcgagtggatcctgccgtttctgcgccatcgtccggttgccctgctgcgcgcgccggaaggtgttgaaggtgagcaattcttccagaagcattccgagcgattggcgatcccccacatcaaacagctggaacaggcgctggaccccgggcacgcgcggttgatggaaatcgacacaacagcagcgctggtcggcgccgtgcaaatgggtacggtggaattgcacacttggggcgcgacctcggacaagatcgaaacgcccgacctgttcgtgctcgacctcgacccggacccggcgctgccatggaaaaccatgctggaggctgcgcaactggccttgtcagtgctcgatgaactgggcctggatgcgttcgtcaaaaccagcggcggcaagggcctgcacatcgtcgttccattggcacggagtgatggctgggagacggtgaaagccttcgccaaagccatcgcgaagtttatgagtgaacaactgcccgaacgctttacggccacctcaggcccgaaaaaccgtgtgggcaagattttcgtcgactacctgcgcaacgcgcgtggcgcgagcacagtggcggcgtattcggtgcgggcacgcccaggcttgccggtgtcggtgccggtcagtcgcgaggaattgagtggattgcgtgacgcccaacagtggacggttgccaacctgcagcagcgcttgcaggctttgaaggccgacccgtgggccggatatgccaacaggcagaagatcagcaaaaaaatgtgggaccggctgggcgcgaaaccaccggagtgattcgcgccagggattggcgtcagatcaggataaaaatcagcgccagacccgcaaaaatcgcccacttttccaggtagtaacgcgcacgattgcgctttttcagctctttgccgcgcaggcgaatcttgtacaggcgagtaaaggcgcggttcaggccaccggtcttgtcgccgtcatcattgggcgaacctgctgcggccatcacgttgcggctgaaccagcggttgaacgccgcggcccagcgatacttcatcggccgttcgatatcgcagaacagaatgatgcgattgtgctgtgtggtgttttctgcgtagtggatgtaagtctcatcaaacatcaccggctcaccgtcacgccagtaatagctttcgccatccacgttgatatagcagccaggatcgttgggagtatccaggcccaggtggtaacgataggaaccggcgtacggatcgcggtggcgcaccagcttggagcccggtggcaactcggcgaacattgccgccttgatcgagccaatgctctgcaccagctcagtggtgcgcgggcacagcttcatcgccgaagggtggctgtcgccgtaccacttgaggtaaaagcgcttccagcccgacttgaagaaagagttgaaacccacgtcgttgtattggtccgaacgcttgatctcccctgcccgcatcaggttctggccttcctggcggatttcctcccaatgctcctgcaaggggctcaggtctggaaaatcgccgggcgacaagaacggccggctaggctgccgggagaacaggtagaggaaacagttgatcggcgccaggaacgtcgagtgatcgctaagctggcggcccagcttgtgtcgcacccgaccacgcaggtgtacatacgcaatggaggcaacgtagagagcaacaatgatgagtttcaagggattcgtcacaagtcagtagagaacaggctgctcctgcatgcccacaacggccgaggatttataagcagcacctgaaatcacagttacacattggcgcccgggcggttcggaaacaaaccggcccagggtcattggcagttatttagccacagtttgtaactaaaggttaactaagaattgtgaaaagctgtccaccaaggagatcggcagcccgggggcagcggcatacaacaggtgcgctctccctgcccttcgctactgcagcggcgtgtcatccttgcgctcccgccggccgaaagcgctgtgctccaacgatgagaacgcaatggcagcacgcggtttcagcgcaaagtaacgaaccagtgcaatcagcagccccagaaacaggccagccaccaagctgagcgcaataaccaatactttcttcggtttgacagggctcagcggctcctgcgcgcgtcgatcaatcgtcaccagcttgaggttgctcatgtcgatattcagcgcgtgcaaccttgcgacttctgcgcgcaacggctctacgtcctgcaggaaaatgtcttcattgccacgcttgcgcaacacttcaacctcacggttggtttccagcatctggagttctttgccgatctgggcaattcgagagttggtgaagtcatcactggtacgctgttgcaaagcggtgcgctcagcttccagagcctcggtccccatgaaatacagcgggattttctgattattgacctcggtacgcatgacctgactggaaccgctgcgggaggcgtccgccatggatgagggcgttgtcggcgtcttgatgcccatggacttggcaatggaaatggcttcggcaagttctgccaggcgatcggtacgctcaatcttcatctgcaaacgcagagcgcccagctcatcctgcaactgagcacgcttgagcctgtccgcttccagcagtttggcgatcttcgactctttttcggtttcgtagttggaacgggccgcgtcaatcttccccttgagctcgttcaaacggttattgacaatcactttaaggtccgcgcccacctgatcacgttcggcagcaatcgcgtaatcgacaaaaccgttgaggatggtcacgccatcaacgtcctcgggatattgcagttccaggcgaatataattactcagtgagtcggacttcttggggtcgggcaacgtcaggttgacggaattacggttgaacgcctcaaaactctgctcaagggtctggcctggtttctggaaggtcttgaacagttgctcatgagatttgaaaaagcccagtcgcgcctcataggaatccagttgcgcacccactttcgacaacgcttcagcaggcggcaacttgtagacctcggatcggttcagcgcatccagttcgttgatggccgccgggcgcacaacactgctgacctcatagaccttcggcgccaggaacgcataacccgctccgagaatccccgcgaatatcgtacagcccactacgattcttttttgtctccagacggagtgaaacaattcaaacaagtcgatctcatcggacgctgcagaaacattatgcggagcggattggttcaaaattaaaacacctaaaagttaatactaaatagccatcacccatcggacctgaatggcagggacaacgccctgagtccggctcaccaatggctatctgaccacccgcgcgctggaaaagtccgacactgttttgagattatttctgtttcatttctgctggtatcactactgacaatgacttgtaggtcgaatactggcacaagagtagtcaaaagttcagtaaatagccgacggccaaagtaaaaaaccacgcacgatgccgagccgaacccgctgttgaaactattcaacaccattggcaaaacatctttttggatccaaacttccttctccagcaaaaaggaggttggcgtgcacttggcttcagatccggactatcagaacctgcaaggcatttgggaacagatttctcttgaagataacggcgtgctcaaccccgctgacgcgcataccgcgccgggagccctgaccactatccaccgggaccgctttgaggtaacaaccgttgagggcgatatattgctggctggccgattttttctggacagcagcaccacccccaaaagcatcacctgggtagatgccataggcgatgacgccggcaagttactgcccgcgagttatcgccttgaaggggataagtttgtgtttattgcagcggacgagggcgtgcccaggccaagcgccttcagtacgggaccagggcagaccatgcgcacatttgtgcgcaaggcctgacagacgcgtcctccgaacttgcgacagcgttttcacatggccttcactttcaggcctgtagcgtctgccctacctactccagtgaatcacttgcccgcctctgctcgcgggcttttttttgcgccggcaaaacccttcacgcaatgcgcttggtggccgtcagggtgaagcacagcggcagttgtgccgattggtgctcgtactggtcgtagagctcctcacgattggagtgcgggtattcctgcaggtgggtaacctgcaagcccgcgacaatcgctgcggtcaccacactgcccaaggtatgcacataccaataggaggtggggccagccgtgtccgcccgcccttcgtaaacgatagattcctgcaatacgaaagggtcgcgttgaaagtaggagctggcgggcagcagcgggtttgcggccttggggtcgaacatttccaggaacgggtgagtctcgtagatcaccagcgtccccccgggcttcagcgtattggctgcatggcgcataaacagtgcaacatcaggcatccagttcagtgcaccaatcgtcacgagggcgacatcaaaccgaccgagcaaacgctcgggcaactgatggatatccgcttcaataaattcagggctgtggggtgagacgtcagccagctcccgcgcttgctgcaaaaaagcgccggactggtcgacgcccaccacggaacgagcccccaggccgaacaacgacaggctttcgcggccattgttacaacacagttgcacgacatccctcccggcaacgccgacactttgcaacagcgcggtgatcgtcgggtcgaggcaggaaaaacccgcatcgcttactgactcaaacagtgttttccaggtggccgagtctttgtgcagccgggctgatgcgtcccaggcgtccttgttactggcaattgcctgtcgggctgagggcatatccattgcgtctccagagaatcaattccgtgagcatcggaaaatatgccaattggccgtcagataaaaccctctgcgcggcgaaacttaacttgaagcctacaggtcactaggccattgagtgttcagtccttgaacaccattcttgaagatctcgccgtggcctctcactccgacctgcgtaccactttgtccctggacagcctgaattttttcctggcggatgtacgtgacggcctcggaccgtatctggcgatctacttgctcgccgtgcatcaatgggaccccgccagtatcggcgtagtcatgaccctggccggcgtcgcggccctggccacccaaggcccggcgggcgcattgatcgatcggacccggcgcaagcgcgcggtgattgcgacggcggctgtgctggtgaccgccagttgcctgctgctgccctttgtcagttcatttacgtgggttgcgctgactcaggcggccagcgccgttgccgcatcggtgttcgctccggcgatttcggcgatctcgctgggcatcaccggcccgcgcgcattcacccgaagaaccgggcgcaatgaaaccttcaatcacgccggcaacgccgtggccgcgcttttggccggagggctggcgtatctgttcgggccggtggtggtgttttatctgatggcttttatggcggtgggaagcattgtggcggtcagttgtgtatcggcagcggcgatcgaccacgaagtcgcacggggttttgacccggcgcaccgcagcgatcacgagcaaccgtccggcatgaacgtgttgctggccaaccggccgctgctgttgttcgccatttgctgcgcgctgtttcacctggccaatgccgcgatgctgccgctggtcagtcagaaactggcgcagatcaacctgcaaatggccacgccgttgacgtcggcgtgcatcgtcgctgcgcaattggtgatggtgccgatggcctggctggtggggttgaaggcggatatctgggggcgaaagcctttgttgctggcgggttttctgattctgcctttgcgcggtgtgctctataccttgtccagcgacccctattggctggtggctgtacaaatgctcgacggcatcggcgcggggattttcggcgcgttgtttccggtgatcgtcaaggacctgacccagggaaccgggcgtttcaacgtcagcctgggcgcgctgtccacggtcttcggcctgggtgcggcactcagtagcagcctggcagggtttgtggtgcaacaggccggctacaacgcggcgttcctgaccctggccggtgtagcgggcgtggctctggccttgctgtggctggcgatgcccgagacgcaggagaaagcatctttcgcctgccatacaactgtcgcctgacatatgcgacaatgcgcgccaaattccaacacacatccaaattttctgctcagcgaccgggtttcgcgccttgatgtcgctgttgacgcatgcctgaaggctcctgccgccacgctcgcaacccattgataggtaaagtaattgatctccacagctaacatcaccatgcagttcggcgccaagccgctcttcgagaacgtctcggtcaagttcggcgcaggcaaccgttatggtttgatcggtgccaacggttgcggcaagtcgaccttcatgaaaatcctcggcggcgacctcgacccgtccggtggccaggtcatgctggagccgaatgttcgcctcggcaaactgcgccaggaccagttcgcctacgaagaattcaccgtactcgacaccgtgatcatgggccacgaggaactgtggcgggtcaaggccgagcgtgaccgcatctactcgctgccggaaatgagcgaagaagacggcatggccgtggccgagctggaaaccgagttcgccgaaatggacggctacaccgccgaatcccgtgccggcgaactgttgctgggtctgggtatcggcatcgagcaacacttcggcccgatgagcgaagtgtcgccgggctggaaactgcgtgtattgctcgcgcaggcgctgttctccgaccctgaagtgctgttgctcgacgaaccgaccaaccacctggacatcaacaccatccgctggctggaaaacatcctgactcagcgctccagcctgatgatcatcatctctcacgaccgtcacttcctgaacagcgtgtgcacccacatggctgacctggactacggcgagctgcgcctgttcccgggtaactacgacgagtacatgaccgtggcgacccagtcccgcgagcaactgctgtcggacaacgccaagaagaaagcgcagatctccgagctgcaatccttcgtcagccgcttctcggccaacgcctcgaaagccaagcaggcgacttcccgggccaaggcgatcgacaagatccagctggccgaggtcaagccttcgagccgtgtgagcccgttcatccgtttcgatcagaacaagaagctgcaccgccaggccgtcatggtcgaaaaaatggccaaggggttcgacggcaaaccgctgttcaaggacttcagcttccaggttgaagccggcgagcgcgtagcgatcattggcccgaacggtatcggcaagaccaccctgctgcgcaccctggtcaacgaactgaccccggacgccggcagcatcaagtggaccgacgccgccgaactgggctactacgcccaggaccatgcgcatgacttcgaagacgacgtcaccctgttcgactggatgggccagtggacccagggcgagcaaatgatccgtggcaccctggggcgcatgctgttctccaacgacgagatccagaagtcggtgaaggtgatttccggtggtgagcaaggccgcatgctgttcggcaagctgatcctgcagaagccgaacgtgctgatcatggacgaaccgaccaaccacttggacatggaatccatcgaagcgctgaacctggcgctggagaactacccgggcacgctgatcttcgtcagccacgaccgtgagttcgtatcgtccctggcgacccgcatcatcgagttgagcgccaccggcgtgatcgacttcagcggcacctacgatgactacctgcgcagccaaggcgtggtgttctaagtaacgccactgtagccatggcaagcaggcttactgtggtgagcgggcttgccccgcgctggggcgcgaagcggccctaaaacaaacaccgcgttctatcagacagaacgcggtgttttttattggggccgcttcgcgccccagcgcggggcaagcccgctcaccacaacctcagcaagcccgctcaccacaacaacccggcgctccaggacagccctgttaatcacgcaaagtagttagcctgctttcctttcccccacgcccttgcgatcatgcgctcaccgcccgcccgcgaacgagtctccatgcctgccgccgcccccagctcaatgtcgatcaccctgcagatcgtctccattgtcttctacaccttcatcgcgtttatctgcatcggcctgccgattgccgtgattccgggttatgtccacgagcaactgggcttcagcgccgtggtggccggaatgaccattggctcgcaatacctggccaccctgctcagccgccccatggccgggcggatgtcggataacgtaggcaccaagcgcgctattgtgctggggttatcgggcatcctggtcagcggtgtgttgacgtttttcgccaccttggtgcaaagcacgccgaccttgagcctgggcattctgatcgtcggtcggctattgctcggtgtggcccaagggttgatcggcgtgggcactatcagttggtgcatgggcgcggtgggcgccgagcacacggcgcgttcgatttcctggaatggcatcgcgtcttacggcgccattgcgatcggtgcgccgctgggtgtggtgatggtcgcgcaatacggctacaccagcctcggcattacgctgtcgttgctggcggcgttggggttggtgctgatccgcaataaaccgtcggtaccggtggtgcgcggcgagcgtttgccgttttgggcggtgttcgggcgcatcgcgccgtttggcgcgagcctgtgccttgcgtccatcggctacggcacgttgaccacctttatcaccctgtactacctgaaccgcggctgggccggtgcggcgtactgccttacggtatttggactgtgctttatcctctcgcggctggtgtttatctcggcgatcagccgtttcggcgggttccgcgcggcgattgcctgcatgaccatcgaaaccctgggtctgacgctgctgtggctggccccctccaccggcgttgcgctgatcggtgccgggctgaccggtttcggtttatcgctggtgtacccggcgctgggcgtggaagccatcaaacaggtgcccaacagcagccgaggcgcggggttgagtgcttacgcagtattttttgacctggccctggcgattgccgggccgttgatgggcgccgtagcgctgaacctcggctacggctggatcttcttctgcgctgcactgctgtcggtcgcagcgttgaccctgaccgtgatgctcaagcgtcgcgcttattgatcagccgtctgcaggccggcgcgggtcgattggccgagggtgtggacgaagaaacgccccgcctctgaaatcaggtcgcggtggatgccctcgcggtcgacgccgtcggcatccgtgcagacaactggcatggcagccagttggtcgctgtcacagggcgccatgaacacgaagtgccctgccccggccagcaatttgaagtccggtggctctggcagtttgcgcgccagtgcagcggcgttcttgtccacggccaccagcttgtcgccatcgccgctgtaaagcagcaccggcacgtgcacgtcggccagggtgtggcggccgaacatcaggctcagaggggccatcaacatcaatgcgtgtatacgcgggtcggcctggggttgcaggtcatcacggtcgaccaccagctcgcccttggtggtgcaggcatcacggtcttccgggcgctcctggcaataacggcgcaggcgatcgaaatcaggtttggcgcctgccagaatcagtgcggtttcacccccggccgaatagccgatcacgcccacctgatcaacgttgacgaagggcgacagcatcgggtcgcccaaggtggcggtgatcgcttcggaaatctggattggccggccatacaagttgctcacagtgccgaggcggctgtggtccttgtagttgtcgccggggtgcagcacggccacgaccacaaagcctttacgcgcgagcgaagtggccaggtcgtgcagcgccagcggtgtgccggtattgccgtgggacagcatcagcatcgggaaacgcccgatggcgaccttggcgtcttcggtggccgcgacgttgtacgggcccagttgcgtggagtgggcgtcgtcggtggacgggtagaacgcaatggctttcatcggctgcaaatccagcggatcaagaaaactcatccggtgaaagccaacgctccaatgcgggtgcggcgcaggggcggcgtgcactgaaatcaggccgccgagcagggaaagaaccaaaacagcacaaagacgcatcatggggatgtccacctttgctgcgcagccacgttcaacatccgccgcatgtctagttgaaaagtccatggttcaaggcactcgcaccgggtgataaacccatgtgtgcataacctgggccaaagtaaagacagcgggcaaacgaaaaaactccgtattccggtcgttttgaggcgatcagaatacagagtttaggcgcccggtttcagattgataccgggaacaagcgaaatttacacaagccttacgcggcggcgaataattgttcgctgatgactacgttggcgtcgctcagggccttggcgcggaactcatcgccataggccaggccttgggcgcggacgaattcgatgtcggtgatgccgaggaagccgaataccagcttcaggtagtcttcgtgaccgacgttgctcggctgcccggcatgcaggccgccagcggtggaaacgatgatcagtttcttgccaccgcacaggccttcggcgccggcttccgagtagcggaaggtctggccggcaaccgcgatgcggtcaatccaggccttgagttgcgacggcaccgagaagttgtacatcggcgcgccaatcaccacggcgtcagcagcaatgaattcagccagcgaggaagcgctcagttcagcttcatgcttttgtacagcgtcacgcagctcggcggcggtgcccaaagcgcccagggtcagcccggaaaaatggctgatgccttcgctcgccagatcacggtaagtcacctctacgcccggctcggcggcttgccaggccttgaccacacctgcgctgagtgcacgggaagccgagttgtcgccgaggatgctggaatcgatatgcaacagtttcatgcgggatctccaagtgaggatcgccactgggcgatcaattgagggtgatcctacaggtgactccaatatacgattagagggctaaaatgcgtttgatcgtcccactgacagaacaattcaaatcccgccgaaatccaatccgacggggttcttgcccaatcctctgcaacgctggatttcagccacgcttcacttcatcctcgccgcagttccgacagccactgggcacaccatgcacgaacacactccaacactgaccaaaagcctgaccctgctgctcgccatctgctgcgggttttcggtcgccacgatctattacaaccaggccatgctgccgctgattgccaacaccttcgaggtgtctacggcccacgtcgggcagatcgcgatgctcacccagctcggctacgccagtggtttgctgctgtttgtgccactgggcgaccgcatcagccggcgcacgctgatcctggccgtgctgtgcatcaacttcatcgccctgctggcgtcggccaccgcgccgtcttattccttgttactggtggcgagcgtattgctggggctgtcgggcatcagcgcccagataatcattccggcggcgtccgacctcagcgaaccggcgcacaaaggcgcggtgctggggttaatggtcagcgggttgtcggccggcgggttgctggcccggaccgtcagcggcgtggtcagcggctggctgggttggcgcggcatgttcgccctcgcggccgccctggatgtggtgctgttcatggcgattctgacgcgcatgccggtgtcggtctccaccagcaaactggcctatggcgccttgcttaaatccttgtggggcctggcgacgcaatacccgactctgcgccagtcggcggtcaaggcagcactggtgtttggtgccctgaacgtgttctggggctcaatggccgccctgctggcttcgccaccctatggcttttccagcgcgcaggccggcctgcttgggttgtcggcgattgtcggcattctgtgtgcagccaggatcggccaactcacccagcgccatagaagcctgctggaacgggtcggcatcggcatcgtgttgagcgctttcgtactgatctatgcctttggcccgcgcggctggtgggcgccgatcctggtggcggcgaccttcctcgacctgggcaaccgcatcaaccaattggccaaccagactcgcgtactggcactggaaccctccgccaccagccgcctgaacaccgtgttcatggtcgtctatttcatcggcggcgccctgggctcggcggccggggcctttgcttccgaccattacggctggcaaggccaggcgctgaccggcgcagggtttgccgggctagccctgttgatcaccctgctcagtgggacgacacgtaaatcgacgccgacgtaggcgccggcaacgcgtaggtgcgtttcatccactggatttcctcctggggtgtacgcccgaagaagcgcttgaactcacggctgaactgcgaggcactttcatagccgaccttagtgcaagccgtagccgccgtgatatcgctgcgcaacatcaacaagcgcgcctggtgcaggcgcgtggacttgaggtactgcatcggtgaggtatcggtcaccgtgcgaaaatgcgcatgaaaactcggcacactcatcatcgcctccccggccagcgcctccacatccaggtgctggtgataacaggcgtgaatcttgcggatcgcccgcgccaccttgccgaattgcccctgtcgcgtcagcgctgcgcgcattgagccgccctgctcgcccgtgaggatccggtaatagatttcgcgcaccagcgccgggccgagcaactgcgcgtccatcggcgtgctcatcacctccagaaaacgcagcagtgaatcactgagcttgtcgtccatgggcgacgaatacataccgcgcggtgcggcctcgatcaacgccggaaagtcatccagcgccaccatcaactccgccgccagggtgaaatccaggcgcaggtacaccgccagcatcggctcttgctccgtggcgtcggtgtccatggtgaacggcaccggtaccgacaccaccaggtaatgctgggcgtcgtacaggtaaatctcttcgcccagaaacccgcgcttgcgcccctggcacacaatcacgatacccgggtcgtagagcaccggcacgcgctgcaagggccggttcgagcgcaggaagcgcacatcatccagtgcggtcaggttatagccttcaacaggcgccaggcggcccatcaactcgacgattctttgggttcggcccatgttcaaaggctcctgcacgaaaaccgcacgatactgcgcacacagcactctggctacgcattcataggaataggcaatcagcacattggaatgcatattcgcccgggtcacccttttccgtagcctgaaacagcactttcagccctcggagatccaccatgcttatcgtctacaaccccgctaacggtgaagaaatcggccgcgttgccaagagttcggcagccgacgtcaaagccgccgtcgacagaacctgcgccgcctttcccgaatggtcggcaaaacttgccagtgaacgcagcacgatcctgcgtcgctggcacgacagcgtcaaagccgacaaggaggctttcgccgaactgctgtgccgcgaaaacggcaaatgcctgaccgaagcccgcggcgaaatcgactacggcctgggctttatcgagtggtacgccgaagaagccaaacgcgtttacggcgacaccatccccacccacgaccgccatgccaacgtgacggtgacgaaggaagccatcggcccggtcgccgccatcaccccgtggaacttcccattcatgatgatcacccgcaaagtcgccacggccctggccgccggttgcaccatggtaatcaagcccgccgaagacaccccgctgaccgccttcaagctgctggaatacgcgcgcaaggctggtatcggcgaaggcgtgctggaagtggtggtcggcgaccccagggaaatcgggctgatcctgaccggtgacccgcgcatccgcaaaatcacgtttaccggctccaccggcgtcggcaaattgctcgcggcgcaatgcgcggccaccgtgaagaagatgaccctggaactgggcggcaacgcgccgtttattgtgtttcaggacgccaacctggatgaagccgtgaaggggctggtgagcgccaagctgcgaaactccggccaggtgtgcatctcgccgaaccggatctttgtgcagcacagcattcttgaagacctcatcaagcgggtgaaggtcgccgtggccgccattgaagtggaccaaggcctgcgtgaaggttttgtggtcgggccactggtcaatcaggtgggcttcgacaaagtcgtgggcctggtggaggacgccaaagcggcgggcgccaaggtgttgatgggcggcaaacctcacgccaaaggcggcctgttctacgagcccaccgtattgaccggtttgcaggacgattcgccactggcgacaaacgagattttcggcccggtgttcgcgatctattcattcaaggacgaagcagaagtcatcgcgcgggccaaccagactgagttcggcctggtggcctacgcctacaccagtgcgttgggccgttcgctacgcctgtcgcgccaattggaggctggcatggtgatcctgaactcgggttctgtcggcacggcatcggttccgtttggcggcatcaagcagtccggttatggtcgtgaaggcagttattacgggatcgaggagtacgtgcatgtgaagtatgtgctgatggcaggcgcacagttctaagccgtcaaacccaaaaaacgcgaatgcccagaaggcattcgcgtttttttgtagtggatttgcgcttgtcagacgcggatgattcgtcccactgacaggacaacaggctgaccatgcaagacctcaacgacctctactattttgccaaagtcgtggaagccggcggtttcgccgcggcgggccggctgctggggattcccaaatcacgcttgtcgcggcgcatcgccgagctggaagaacgcctcggcgcccgcttactgcaacgcaccacgcgccaattgaccctcaccgccgtcggcgagcgttacctgcgccactgccaggcgatgctgctggaagcggaaatggccgatgaggccgtggccagcatgtccagcgaaccccgtgggcggctgcgcgtcagctgcccggtgggcatggcccagcacatgctgccgggaatggtcgccggctttctcgccgcccaccccttggtgcagcttgaaatgacactggtgaatcgccgtgtcgacctggtcgcagaaggcattgacgtggccttgcgcgtgcgcgagcaaggcgatgaagacccgctgctggtgaccaaacgcttgcgccaggcgcagaccctcctggtggccagccccgaattcctgcggggccggcagatcaacaccctggaagacctcaagcatttgccggtgctcggcgcgctggaacctgaccgcctggtgcacctgcgcctgctcgaccccgaaggcaatgcccaagatgtgtcgatggaagcgcgcctgggcatcgacgacttcatcgtgcgcaaggcctgcgcccttcaaggcctgggttttacggtattgccgatgatgtattgcgaagaggaactggccagcggccaattggtgcaactgttgcccgaatggtcctcgccgggcggctggttgcaggccgtctacccgcaccgccgtggcgtactgccggccatccgggcgtggatcgactacctcgaagaggccttcaagggctgcggagatcgtttgttatgagaatgaccgaactccaggtcgccacgttttgcctgagcctgcccggtgcgcgggaagactacaaatggggcggcgtgcgcgtgttctcgattgccggcaacaagatgttcgcgctgcaaaacctgcgcggcgagtcgttggcgttcaaggtcgacaaggaactgttcctgggccacgtggaccgccccggcatccatccggcgccttatcttgcgcgggcgcagtggatcatcatgaacaccccctacccgctgggcgccgaagaactgcgcggcctgttgcagcgctcccaccagttggtggtgagcaaactgcccaagcgcacgcagatcgggttgttgttagaggattgaaaacagcgtgccgccgaggaacaactggtcgaaccagaacacctggtgcaacagcacgatcacccagaacagcacctgataagacaccttgcgcgtcttgtggcgaaacacttgctgagcgatcaaagcacccggccaaccaccggccagctcgacggcgtgcagaatgttttccggaatgcgccggccttcggtctgcgccttgcgcttgtcgctccaatacaacagaaacgccaccacgctgaccacgccataggccgccagcggcagcacggtttcgccgcgatgccacagcaacaccgaacccagcagcggcgcaacgcacagcagcaccaggaccagcgccttcaggcgcgggtgctgaatgctcatggcttgaccgcagaccagtcgatccagccgaactgccaggtggccagaatcaccaggccgaacgcgatccggtaccaggcaaacgccgcgtagctgtggctggcgatgaacttgagcaaggccttgaccgcgatcatcgcaaagatgaacgaggtaacgaaaccaatggcaaataccggcaagtcatccggctggaacaggtgccggtacttgtagcccgaatacactgccgccccgaccatggtcggcatggccaggaagaacgaaaactcggtggcggtcttgcgcgacaggccaaacagcaggccgccgataatcgtggcgcccgaacgcgaagtccccggaatcatcgccaggcactgggcaaagcccaccttgagcgcatccttccaggtgatgtcatccacggtttctgcatgcacggcgtgttggcggcgctcagcccacaacatgatcacgccgccgaccaccagggccgcagctacggtgatcgggttaaacaggtagtgtttgatcaggtcggcgaaaatcacgcccagcacaatcgccggcagcacggcgatgatcaggttgacggtgaagcgctgggccttgcgctgggtcggcaagccgatgaccacatcgaaaatcttgcggcgaaactcccagaccacggccaggatcgcgcccagttgaatgatgatgttgaacgcttcaaaacgttcaccgccgaagccgatcaggtcagcgacgataatctggtggccggtgctggagatcggcaggaactccgtcagcccctccacgatgccaagaatcaatgcctgtatggcggtccaaaaatccatgctttctccaaaggtcatgcgcgtggcatgcctcgttagtcttttttaaagttcactgacgaccagtgcgcggggttgattctcaacaccggcctgcaaaaattccgtgaaaaatcaggcagtactcaggttttccgtttgcaggccgaaagcctatcagacaagccggaaatgtcgatgcagcacccacaattataaaaagcagggagtgacaggacgatgaacagtttgcgcagcatgtcgatcagccgccgtttgtggctgatcctgatagtcgccgtgttgatgcttttgaccctggggctgttgatgctcaagcagatccatggcgacctctaccaggccaaacgccagcaaacccagcacgtggtgcagaccgccagtggcgtgctcgcctattaccagaaccttgagaaaaccggcgtgctgacccgcgaagccgcgcaacagcaagccttgagcgccgtgcgcggcctgcgttacgaccacgacgactacttctggatcaacgacctgacgcccgtgatgatcatgcacgcggccaaccccaagctcgacggccagaacctctcggccatccgcgacccggacggctttgcggtgttcaacgagttcgtgatactggccaaagccaagggcgccggcaccgtcaattatcgctggcccaaaccgggggccgaagcaccggtggagaaaacctcgtatatccagctgttcgagccttggggctggatcatcggctctggcgtgtacgtggatgatgtacaggccgagttcaacggccaggtatggagggcctcgctgatcggcctgggcattgccgtggtcatggccctgctggtgatgctgatcgcgcgcagcatcgtgcagccattgcaggcggcggtgaatgccatggagaacatcgccagcggcgaaagcgacctgacccgcagcctcgacacccagggcaacgatgaggtcacccaactgtcgcggcacttcaacagcttcaccgccaagctgcggcaagtggtcagccagttgcaggtgtgcgccaatgcgctgggccagtcttcgaccgagctgggcaacaatgccacccaggctcacgaccgcagccagcagcagtcgcagcaaatgcagttggtggccacggccatcaatgaagtgacctacggcgtgcaggatgtggcaaaaaacgccgaacacgccgccagcgagatgcgcgacgcccaggcccaggcgcaacaaggccaggtgaatatcgacagcagcttgcagcagatcgaccaactctgcggcaccatcagccaagccgtggacgtgatccgcaccctgtccagcgaaagcacacaaattggcggcgtgctggaagtgatccgctccatcgccgaccaaaccaacctgctggcccttaacgccgccatcgaagccgcccgcgccggcgagcaaggccgagggtttgccgtggtggcggacgaggtccggctgctcgcccagcgcacgcaaaaatccacggctgaaatccaggtgatgatcgaacgcctgcaaggccactcggaagccgccgtcaaggtgatcagcgacagccaaagcgcctcgcaactgaccatcgaacaagcgggccaggcgggtgaaagcctcaatgccatcggccaggccttgcgcaacctcaacgggctcaatgcttcgattgccagcgccaccctgcaacaggcgaacgtggtggaagacatcaaccagaacgtgacccaggcggcggggttgtcccacagcacggcgctggcggccgagcagtcgagtgtggcgagcgcgcacttgcgggggctcagcgaacaactcgacggcttactgcgccaattccggatctagcaccaagccacatgtgggagctggcttgcctgcgatggcggtttgtgggttggtgtacatatccgttgctgcggtaacggctggtgttggttccgctcttacagcgggtcacttttggaagagcgccaaaagtaaccaaaaacgctccgccccaccactcggcgcctcgcttaggctcggtgtgcccgcactccggcttgaatccgtgggccgccgccatgggccatccctggcccatcgcggctaacccggcgtcctgccgggttgcccacggattcaagcctgcgtgcggccagcgtggtttaacggggcgcctcagatcaagatcaaaagcaagagcacggcggcctgacagccggcctgagtggttggatcaaaagcgctgtttttgccagggcggattgcatttcttcagacaaatgaaaatccaaatgtgggagcgggcttgctcgcgaatgcggagggtcagtttatgaatttggtggctgccacaccgcattcgcgagcaagcccgctcccacacttttttgaccgagtgagcctctaatctcttcacaaacctgcttttctgtgggagctggcttgcctgcgatgcaggcacctcggtgtgcggtgatccgacaagcccacaaaagccagcttctataccggaccgcttttgctccacaccactcaggccggctgtcaggccgccgtgctcttgcttttgatcttgatctcagacgccccgttaaaccacgctggccgaacgcaggtattacggagcgggcaaaccggcaggacgccggtttagccgttacccaaacaacggatatgtactcgcccccgtatccacccacaacagtgtgaagttcccccacctctggttacaatcaccgccctctcccacgcctccaaggaaccaccatgtccgggcttgaactgttcgccgccgcccttggggtgatcgctgtctggctgacggtcaaacagaacccctggtgctggcccatcggcctggtgatggtgttgctctacacctgggtatttttcgacgtaaaactctactccgacatgctcctgcaagtggtctacgccgcgctgcaactctacggctggtggcaatggacccgtgccggcgacgtcaagcaaggtcgccaggtgaccagcctcggcgtcccggcgatcatggccagcctcgccgtgggcgcagtgttcagcctgctgctcggcgccgccatggcccactggaccgacgccgcccagccgtggctggacgccgccctcaccggcttcagcctcgtggcgcaaatgtggatggcgcaaaagcgggtgcagtgctggccgctgtggattgccgtggacgtgattttcgtcgggctgttcctctacaagggcctgtacctcaccgctgcgctgtatgccctgttcaccgtgatcgccgtgcaaggctggcgtgaatggcgcgccgacccggcgttgcacgcatgaaagtggtggtgctggccgggccggaatccagcggcaaaagctggttggcagcagagctgcatgcgcgcttcggcggggtgatggtgggtgaatatgtgcgctatttcatcgaccagcatcagcgcgacaccacgctggccgatatcccggccatcgcccgtggccaactcgcgtgggaagatgcggcccgcgccgagcgccctgcgctactgatcctggacacgcatttgctgaccaacacgctgtggagccagaccctgttcggcgactgcccggcctggctcgacagtgaattgctcgcacgccactacgacctgcacctgctgctgtcgccggaagacgtggaatggaccgccgacggccagcgctgccagccggacctggcggaccgccgcgcgtttttccaggccagcctggactggatcgaaacccatcatcaacctgccctggtgatacgcggcaactgggcagaacgccgcgccattgccttcaacgccgttgaacaactcctcgtcgaggccacctgatgaccactgcactgcgtatcgccatcgttggcgcaggccccggcggcctgaccctggcgcgaatccttcaccgtcacggcgtggccgtcagcgtgtttgaacgtgaacgcgggccactggaacgcccgcaaggcggcaccctggatttgcacgtggaatccggccagctcgccttgcaacaggcaggtctggaggatgccttcaaacgcattgcccgctatgaagatcagggttcacggctgatggatcaccacggccgattgctgtttgaagacccgaacccggaagcaggagaccgccccgaagtcgaccgcacgcaactgcgccagatcctgctggattcgttgcccgaaggttccgtgaagtggggcgtgagcatcaatcacgtcagccaggccgacgccacacactggacactgcatcaaggcgatctcagccacggcccttttgacctggtggtgggcgccgacggcgcctggtcgaaaatccgcccgctgctttcgccttatcagccgcagtacagcgggttgaccttcatcgaattcaacatcgacgatgccgaccgcctgcacccacaggttgccactctcgtcgggcgcggcacgctgcaagtggccggcgaagccaaatcgatcatcgtgcaacgcaacgccaatgcgcacctgcgcggctatgcgatcttccgcgtgcctacggactgggcggcaaacacgattgatctggcccatgcgccctcgctgaaaacgcagtttcaaggctggcatccagacgtgctggcgctgtttgacgccgccagccccaccctgctcgtccggcacatccacgccttgcccgtcggccatcggtgggctcaccggtctgggttgacgctgatcggggatgcggcgcatctgatgtcgccgtttggtggcgaaggggtgaatgctgcgatgctcgatgcggccgaactggcgcagcatctgctggggacacctgacggctcgaaagccgtacaggcgtatgaaaaccacatgttcgaacgggtgataccggcggcccagggcagtgctgaaggcgctgccacccagttatcccatgacagcctggcgctgtccctggcccacctgcatcaccaccttacgcctcaataacccagggacaggcccgtgttgcgacgcgggtcgttggccccgtagaaacggttattgcccaccggcttgccacccagggacggggcgcccaccaggatcgccgccaagtggttggcgtcctgaggacctgcaaacttgtggccccagctttccagaattttctgggtatcggggctgaccgcaaagcgttcaaggttggtggtttcaggcatccactgctggtggaaacgtggcgcgtccacggcttcctgaatgttcatcttgtagtcgatgacattgaggatggtcagcaaggtcgcagtgatgatgcggctgccgcccggcgtgcccaccaccatcacggccttgccatccttggtcacgatagtcgggctcatcgacgacaacggcgccttgcccggggcaatggcgttggcctcaccctgcaccagcccgtacatgttcggcacgccgaccttgacggtgaagtcgtccatttcatcgttgaggatcaccccggtcttgctcgccatcacgcccgcgccgaaccagtcgttgagggtgtaggtgaccgagaccgcgttgccccacttgtcgacgatcgaatagtgcgtggtgttgttgccttcatggggcgacacacccggtttgatcgcctgggaatccccggctttctgcggctcgatggcagcgcgcagcttggcggcgtagtccttgtccagcaggtgggcaatcgggttcttcacgaaatccgggtcgccgaggtagctgttgcggtccacataggcgtggcgcatggcttcgatctggtagtgcaggccctgggccgagtgatagcccaaatcggccatcgggtagccttcgaggatgttcatgatctggcagatcaccacgccaccggagctcggaggcggtgcggacaccacgtggtagccacggtagtcacattcgatgggcgccagttcgcgggtcttgtacttgtccagatccgcctgggtgatgatgcccttgccggcctggctggaatccaccagcgccttcgctacccagcctttatagaagccgtcggtgcccttggcggagatttccttgagcgtcttggcgaggtctttctgcaccagtttctggccgacctgcatcggctggccgttgtgcaggaagatcccgcgcaggtccttgtctttttcgaactcgccggtggcggtgtgcagcaggtcgatatcgccctgctccagttcaaaaccgttttccgccagcttgatcgccggggcaatgacctgggcacgcttgagggtgccgtatttgctcagggccagttccatgccggacacggtgccgggtacgcccacggccaggtggcccttggcgctcagaccatcgatgaccttgccgtctttgtccaggtacatgtcggcagtcgcggccagcggggctttttcgcggaagtcgaggaaggtcttgcgcccgtcggccagttgcacggtcatgaagccgccgccgcccaggttaccggccgccgggtacaccaccgccagcgcgtagcccacggcgacggccgcatccaccgcgttgccgccggccttgagcacatccacacccacatgagtggccaaatgctgggccgtcaccaccatgccattttcaccggccaccggggcctgggacgcggcttgcacgccactgaccgtcaagaccagcgcagtggcaattaatgtgcgattgaacggttggtatttcatccatggctactctagttattgagacgcaccaaaatagcccttcctggatccaagccccagcgcaatggcgtttttattacagaacttgtcggtcacagaacgggcgcaaaaaaccccatgctatatttcgcgccctgactgtcgtgcaaggcgctttcacatggtgatcaagaagaccggtattcgtgcccaacaggcggaccagacgcgtgcgcgcatcttgcaggcggccgtcaaggtgttcacccgcgacggctattccggcgggcgcgtcgacaccatctccaaagcagccgactccaacgaccgcatgctttattactatttcggcagcaaggagcatttgttcgtctgcgtgctggaacagatctacgagcaattcaacaaagctgaaagcaagctcaaactcgacctcacggcgcccgcacaggccttgcgcgacctggtggcgtttatctggaactactacgtcaagcacccggaattcgtggccattttgagtatcgagaacctgcatcaaggcaagcatgcccagcagtcgggggaaatgcgcaggttgtcgggcgaagcggtgggcgtgctgcggccgatcatcgaagccgggcaggcgcaaggcgtgttccgcgaggatgtggacatcaagcacgtgtatttgatgattgcctcgctgtgctacttctataactccaaccgccataccctcagctcgtttttgggtgaagaccttgcggacaaggggcagcagcaggattggctggcctttattaccgacctcgtgctgcgcggcgtcaccccgcccccactgtagaaacccaatccaaatgtgggagctggcttgtcgggtcgccgcatcgctgcgatagcggtgtcccagtcaaaatctccagtgactgacaaactgctatcgcaggcaagccagctcccacagttttaaccgaggcgtgtcagtgggtaccggggttggcccgcaggtgcgccaccttctgctccaggccctgccactgcggcgcattcggcgcgaatttgccgcgcagatacgccaccaaatccgccacctggccattcgacagactgtccttgaaccccggcatataccccagatcccgggtcgccgggttgctgatgccttgcaaaatcaccttgatcaaattgtccggctggtcactgtgcacattggtattggtggccagtgacgggctgaccccaaacaacttcggccccaggccatcggcatggcaggccttgcacgagccttcaaagacgcgccggccattcggattcggtaccgtcaccgccaccggttgcgcctcggcagccgcttcactgttgagcgaagccaaatacaccgccatcgcgcgaatatcggtcttgggcagtttcgacaattcactcaccaccggccccatcggccctgccgccacgccgtgggcagccgaataccccgtactcaaataggtgaacaactggtcttcagtccagggcgtcggcgccttggacaacccgtttaacgccggcgcctcccaaccatcgaccatgccgcctgcaaggaacgccttgccacccttctccgcgcccatcaggtctcgcggcgaatggcacgccgcgcagtgccccaggccattgaccagataattgccgcggttccactgttcgctgcgctcaggctgcgcggtgatttcgccacgcctgagattcagcgcattccagcccgccatcaagggccggatattgaacggaaagcgcatggcattcggcgtcggcgcctggctgaccggcgcctgactcatcaggtacgcgtacagcgcctgcatatccgcatcgttgatattgcgaaacgccgtatagggaaacgccgggtacaaattacgcccgtcacggccaataccgtcacgcatcgcccgttcgaacgccgggtacgaccaggcgccgatgccggtcttcacgtccggggtgatgttgctgctgaacagcgtgccgaagggcgtttccatcgccagcccgcccgcgttggttgcaccgcccggtgccgtgtggcacaccgcgcaatcgcccacggctgccaataagcgcccgcgctccagggtggccttggaccaggtaccggcagcgggcggagcaatcggcgcgatttcattgtggaacggccaagccgttgccatcagcgcacccaaggtggcgaacagggcgccaaaccaccacttcttgcgtttctccggggatttggccggctcgcccagggtgcctgcattcagcgcggccagcacccgttccggagtgatgggcaactcgcgaaaacgaatgccggtggcgtcgtaaatcgcgttggcaatcgccgctgcactcggcaccgacgccgactcccccgcgcccatgggcggctggtcctggcgtggcatcatcagcacatcgattgttggcacctcgggaaaggtcaggatcgggtaaccgccccactccttgctcgccaccgtcgactcttcaaaggtcactcgctccttgagcacgcggctggtggactggatcacattgccgtgaatctgatgctgcactccggccgggttgatcatcatccccgagtcatggccgatcaccacccgcgtcaccgacacatcgccggtgtgcttgtcgatggcgacatccgcgacccaggccgcccacgccgcgccgaaaccggggaatttgctgtggatgtagcgcgcataggcgaaaccacgaccgcgcagcagatggtcttcattggcggtttgcatcggcgccgtgcgcggtgcccagttggcgcgctcggcggtggacttcaccaggtcgatggcgcgctcgtccttgaggtagcgcaggcggtattccaccgggtcgacgccggccgcaaaggccagttcgtcgatataggattcatgggcaaaggtgttgggcaacgccgacacgccgcgcatccacgacgcgcgcacgatgggcgccatgtcgttgatggtcacgcgcatattctcgatgtcgtacggcgggatcgaagtgcggtcgcccatttcgaacatcgccgccaccggttccacgcggccagtcaacagcaacgccagggtcggcgcgccattggacgggtagctggtttcaaagtcgtaggcggcgatgctgccgtcggcattcagcccgccatccacgtccatcagttgagcggtgcccttgggctcccacaggtgctcttgttcgcgggtcaactgcacgcgcaccggtttgcccacggcgcgggataacaacaaagcatcggcgcacacatcatccgcacaattgcgcccgtaacagcccgcagcctccatgcggatcacgtcgatcagcgcttcatcgcattccagcaaccacgccagatcggcacgcaacagatgcgggttctggctgccggaccagacccggctgcccgccggggaataatcagccacgccacaagaagggccaatcgagccatgcatctgatacggccacaggtaactgcgcggcatgcgctggctggcattcgccaacgcctcatcgacattgccctggtccagcaccgtacggcgcacccgggggttgtcgcggatcgcctgttcgacgtcacgcatgtccggcaaggcgttattccagggtttccagtgcacctgcaattcttgggcggccttgatcgcctgttcctcgcgcaatgccaccacgccgacaaaatcgcggatcaccaccacggcgacgatgccggggatatgcgcgatagatgattcatccacgctgagcaggctattgccgacaaagtccccgcaatccagccccgcatacggcgggcgcaccacgcggccgtggagcatgtccggcacacgcatatcgtggatgtacgtcagctcgccggtggccttgccggggatgtccacccgcgcggcccccttgcccaccaaacgataatcctcgatggccttcaacggcgcatcaccgctgatgcgcaactgatcatgctggccactgaccagttcgccataggttgtggtgcgcccgtctacagcatggaccacaccggcttcgaccttcaggctcggcacgctgacgccccagcgccccgccgcgcgcgccagcaagaaacgccgggcttctgcggcagcgttacgcaaaggaatcgcggaaatctgcaaagtcgcactggcgatggtcgcgccctggttgggcacacgctcggtatcgccgagcaccatcttgacctggtccatgttcaggtcgagttcttcggcgacgatctgtgccagcgacgtgcgaatgccggtgcccaggtcgacatggccgttgaacgcatacaccaggccatcgtcgttcaccgcaatgaacagccccagctccttgggcttcaccgtgggcgtaccgcccttcgccaccgggcccgagggcggcagcacgtcgtcgacgatcaacagcacgccagccttggccagccattggtcacgggaaagggtcgtctcggtcatggtcgtgggtccacagtcatcaggcgggcggcacgcaacacagcgcgcaggatttcgatatgggtgccgcagcggcagaggttgcccgagagctcattgcggatctgggcttcgctgggatcggggttgcggtcgagcaaggccttggtcgtcatgatcatgccgttgaggcaatagccacattgcgcggcttgctcatcgataaaggcttgttgcaccgggtgcggcgcctggcgcgtgccgaggccttcaagggtgacgatctggcgccccgccgcgcccgccagcgggaacacacaggaacgcgccgccagcccgtcgatgatcacggtgcaggcgccacactcccccagaccgcagccgtacttggggccattgagttgcaggtcattgcgcaacaccaataaaagcggggtgtccgccatggcgctgacgtctgttttctggccgttaacctcgagggttaccgtgatgtgggggctgatcattcgcttcgcctgtgccatttggtgaagtagccactacacgaaacaatcaaaaaaaagcgccgcggacctggggcctcgcgacacacttgatacgtgaagtgcctgctacatcaactcagagcaaaaacggtgccagccttgattactcctgtgggtcgtcgatcattttgcgcagcagaaacagcaccgccacccgttcagccgggttgaggttgctcatggtcaactcactgatctgcgcagcacgcggcgcggtttgggcgaccagttcggcaccggcggcagacaggtccaccaccaccttgcgcttgtcttgcgggtccggctccaggctaatcagctccttggccttgagccgctcaacgataccgcgaatggtcgcctggtcaacggcggtggccttgaccagttcagtcaacgaacttgcaccgtgatcgcgcagggcacagagggtgacgaattgcacggcggtgagctgggagtcgccgacattctgctgaaaaatggccagatggcgctggtaagccttgcgcagcaggtggccgacttgctcggaaaagacgtaggaatcaggcacggcgggctcggtggatgactggcgatgggaaggcatgatggcggggatactgaaaggactcaaggtcctcactgcacgaacacaatcaaaatgtgggagctggcttgcctgcgatagcggtgcatcagccaatcgtgtatcaactgacaggccctcatcgcaggcaagccagctcccacatttgaacaatcagcgggccagggaggctgcaggtgccaccacgtcaccgccgatcaccaccgcctcgtcatccaggtacacatcgcaattgcgcaacggaatgtccatatggcacggcgtcttgcgcgtgccgcccacctcggtattcggcccggtggagaacagaaagttgccatagaacgcccgcgcatccatgcacatcccgtcgttcttgtcgtgcaggcccatggccgtccactgcgcccgtggttgcaggccccagcctatatgggagatgccgtacacctcggggtcgttgaagtacttcatgtagtcgcgcaggtattcagcctcgaacccgccgtggattttggtgataaagcccttttcgatctccagcgtgatcttttcgcgggtgtaggtcttgaacggcagcaggatgtcgccgatatccagcaccagcacgccttcggcggtttcctcgttgggccaggagaacaggaagccgctcggccagtgatcccagcgccccggctcatcggcaaaaccgtattcagtcactgaagggtattgccccaacgcggcacggaaatcactgccggcgcgggatttgacgtgaatcgagcgcgcctttttcagcaactgttcggccgccagtacacgcaccttgtcttcttcggtcggcagcatgcgcgccagcacttccggcggttccacggcgagcaggatgcgcgtgccggtcttgaggatctgctcctgctccggcgaatgcagcagcatcatcgtatcgacgatcaggtcggccgcttccagcgcgcgctgcgcggcaatgttgccggtgagcgcggtgtcgccgcagtaagcggtcatgtcattgcccatggccctggggtggttgaacgacggcagctccaccgcgtacaccttggcgcccaggcgctgcgcggcatccatggcggcacgcacggtacgcgggtcggagtaatggctcttgagcacggcgacgctctgggtcgggtcgaccttcgacagcttcagcacgtgttcaaacatctgggtcagttcgcaatcgcttaccggcattttcctgtctcctgtggggctgcaccaagttcaagcaccgcgcttcactctagtgcacttttatagcgtatacgccaattactgacgataagacctgaattgcaggcggactgcaagcgccgagccaaaacgttaccaatccacacaaagccaatatttaaaggctactcagcgttacacaggacaaatgcggccaaaaataaattttataaacacgggcttcccatttcaaaaaatgagcgtatacactttaaaaaccttgcggacagacgccgccgaaaatcacaaagacagaggattacgccccatgggaagcacgcagaaaatcgccattgtcggcgccggccttggcggcgccgccgccgccaccttgctgcaacaagccggcttcgacgtcgacgtctatgagcaggcgccggagttctcgcggctgggtgcggggatccacatgggccccaacatcatgaaaatcttccgccgcatgggcattgaaaagcagctggacctgatgggctcgcaccccgagcactggttcagccgttgcggcgaaagcggcgattacctctcacgcatccccctgaccggctacggcgcgtcctacatcaccgtgcaccgtggcgacctgcatgccctgcagatgtccaccctccagccgggcaccctgcacttcaacaagcgcctggaaaccctcgaagaaaccgacacccaggtgcgcctgacctttgccgacggcgaggtgacctacgccgatatcgtgatcggcgccgacggcatcaactccaagatccgcgaggaactgctgggggtggaaaaaccgctgtacagcggctgggtcgcgcaccgcgcgctgatccgtggcgaccagttggccaagtacgacctcaagttcgaagactgcatcaagtggtggaccgaagaccgccacatgatggtctactacaccaccggcaagcgcgacgagtactactacgtcaccggcgtgccccatgccgaatgggacttccagggcgccttcgtcgacagcagccgcgaagagatgttcgacgccttcaagggttaccaccccaccgtgcaggccctgatcgaatccaccgaaagcgtgaccaaatggccgttgcgcaaccgcaacccgttgccgctatggagccgtggccgcctggtgttgctgggcgatgcctgccacccgatgaaaccgcacatggcccagggcgccggcatggccatcgaagacgccgccatgctcacccgctgcctgcaggaaaccggcatcagcgactaccgcaccgcgttcgagctttacgaagccaaccgcaaggagcgcgcctctcgcgtgcaggcggtgtccaacgccaacacctggctgcgtacccaggaagatccggactgggtttatggctatgacctgtatgcccagcaactgaaatcgggggtggccgcgtgagcaccttcctgtatggcggcaacgtgcaagccaacggcattcgccagcattacctgcgctacggcggccagggcccggtgctgatcctgattccgggcatcaccagcccggcgatcacctggggctttgtcgccgaacgcctgggcgcgcaattcgacacctatgtgctggatgtgcgcggtcgcggcttgtcgtccaccggccccgagctggattacagcgccgacacctgcgccgatgacatcggcgcttttgccgaggtgctcaacctcgaccgttaccacctgatgggccattccatgggcgcacggttcgccgcgggcagcgccgccaaacacccccggggcgttaaccgcgtggtgctgatcgacccaccggtgtccggcccgggccgccgcgagtacccgagcaaattgccgtggtacgtcgattcgatccgtcagtcgctcatcggcatggacgcagaggcgatgcgcgccttctgcgccacctggaccgaggaacaactgcaattgcgcgccgaatggctgcacacttgctatgagcccgccatcgtgcgtgccttcaacgacttccacacggtcgacttccaccaggacctgccccggctcaaagcccctgccctgttgatggtggccgggcgtggcggcgtgatcctcgacgaagacgtggccgagatccaggacctgcagccggcgatccaggtcgcccgcgtgccgaatgccgggcacatgattccctgggatgacctcgatggtttcttccacgccctcggcgacttcctcacacaagaataaggacaccaccatgcagaagctttaccgcatcggccaaattgtgccgagctccaacaccaccatggaaaccgagatcccggcgatgctcaccgcgcgccaggcgattcgccccgaacgtttcagctttcactccagccgcatgcgcatgaagcaagtgcgcaaggaagaactcgcggcgatggacggcgaatccgaccgctgcgccgtcgagttgtccgacgccaaggtggatgtgctggggtacgcctgcctggtggcgatcatggccatggggttgggttaccaccgcaattccgagcagcgcttgcgcaaagccaccgccgacaacgacgccaacgccccggtgatcaccagcgccggcgcgctgatcgaaggtttgaaggtgatgggtgccaagcgcatcgccattgttgcgccgtacatgaagccgctgactgagttggtggtcaattacatccgcgaagaaggctttgaagtggtggactggcgcgcgcttgaaattcccgacaacctcgaagtggctcgccacgacccggccaacctgcccgccatcgtcgccgggatgaacctggaaggcgtcgatgtgatcgtgctctcggcctgcgtgcagatgcagtcgttgccggtggtggccaaggtcgaagcgcaaaccggcaagccagtgctcacggcggccgtcgccaccacctacgcgatgctcaaggctttggacctggagcccatcgtacccggcgccggtgccctgctttccggtgcctactgaggggttgaaagatgagtgaacaatccgccgacgccaactaccagggcgtatggggcaaccgcatcggcttcggcaaaaaggcggcgctgctgatgatcgatttcatgcaaggctataccaccgaaggcgcgccattatttgcaccgggcgtagtcagcgccgtggccgaaagcgtcgagctgctggcctgcgcccgccagcacgggattgcggtggtgcacaccaatatccgctaccatcccggccatttcgccgatggcggcatctgggtcaagaaggccccagtgatgaaggacatggtcgaaggcaacccgctcgcggcattctgcaccgaagtcttgccgcaagccgatgaagtggtgatcaccaagcagtacgccagtgcatttttcggcagtagtctggccccgatgctgcacgcccagggcatcgacaccgtagtgctggccggctgttccaccagcggctgcatccgcgccaccgccgtggatgccgtgcaacacgggtttcgcaccatcgtcgtgcgcgaatgcgtcggcgaccggcacccggcgccccatgaagccaacctgttcgatatcgacagcaagtatggcgacgtggtgagcaagcaggaggcgatgagcacgttcagggagcaataaggattcaccaggaatcacgacaaagagcgtggtcctgcccaaaactgtgagccgcccccggtcaaaggtgggagctggcttgcctgcgatagcggtgggtcagcaacatccttgttggctgacccaccgctatcgcaggcaagccagctcccacaatagaaagccggcgcagctcccagtcttctgacactgcctttggaagtcgcttctacagcactccgaagtgctggaacaaaagcggctgtataaaaaccataagtcaccgccaggagacacccgatgcccattgcgaatgcagcgcccgcgacttcggtcgccgaccccgtcaacacgctctaccacaagatcacctggaagctgattccgttcctgtgtttctgctacctggccgcctacctggaccgcatcaacatcggcttcgccaagctgcagatgctcgaccagttgcacttcagcgaaaccgcgttcggccttggcgccgggctgttttttgtcggctacatcctctttgaagtgccaagcaacctggtgctggagcgggtcggcgcgaagatctggatcgcgcgcatcatgatcacctggggcctgctctcggcctgcaccatgctggtcacctccaccacccagttctacatcctgcgttttttgctcggcgccgccgaagcgggctttttgccgggggttctgtattacctgaccacctggttccccacccaccggcgcgggcggatcatcgcgctgttcatgatcggcctgccgctctccagcgtgatcggcggcccgctgtccggttgggtcatggcccactttgacagcgtcggcggcctgcgcggctggcagtggctgttcctgatcgaagcggtgcccagcgtgctgctcggcgtgctgaccttctgggcgctgcccaatagttatcagcaggccaaatggctgtctgacgaagaaaaatccctgctggaaagcgagctgcgcaaggacgaggccgacgccaccggcagcaagcacagcttccgcgacggcttcttcaacctcaaagtgtggatgctcggcggtatcgacttttcgatcctgctcagcgcctacgccatgggcttctggatgccgaccttcatccgcaacgccggggtgaccgacaccttccatatcggcatgcttaccgccttgccaagcgttgcagcactgctgggcatgctgctgatcggcgccagctccgacaaacaccgcgagcgccgctggcacatcatcgtgccgtttttcatcggcgcggcggcgatggccaccagtaccttctttacccacaacgttgcggccaccgtggcattgttcgcgattgcctcggcggcgatcatcggcgcggtgccggtatttttcagcctgccggcgacctttctcaaaggcaccgccgccgccacgggctttgccctggcgtgttcggtggccaatattgccggtttggtcagcaactcgttgatgggggttgcgatcgacgtcacaggcagcagcgccggtgccttgtggtttttcgccggctgcctgatcctcagcagcttcctggtcatcgccttgccggcgaaactggtgaaccgttaacaacaataatttttcggatgaatcaccatgcaaggtttcctgaaaagctgcgcgctgcttgtcgccgtcggcctgtgtgcaggcacggcgcaagcagctgagaaagtcattttcgacaccgacttcaacgtgctcaacgatgacggccaggccttcatcatgctcgcccagctgcatgcgcaaaaacgcatcgagctgctcggcatgacgctggtcagcggcaacgcctgggttgaccaggaacaggtcgacgccctcaaggccgtggaacgcatgggcgtggacaaagaggtgggcgtctactcgggcgccgcctacccgctgctgcatgactacgccacctatgaggcggaaaaatcgttgttcggctcaggctggccgggggcgttcaaaaaccctcgcccgacctcgccgtcgcagttgatcgcgcccccggatggcctggcgactcacacccaattgcgcagcgaaactgccgcgcagttcatcgtgcaaagcgtgcgtgccaacccgcatcaggtgacgattctggcggtcggcccgctgaccaacatcgccctggccattcgctcggcgccggacatcgtgccgctgatcaagcgcatcgtgtacatgggcggcgccctggagattccgggcaacaccacgccggcggcggaattcaactggtggttcgacccggaggccgcgaagatcgtgttgcgctcgccgatcgaacacgtgattttccccaacgacgtgtgcgagaaagtcaccttcgacaagtcggtgtaccagcgtgtaatcgccaagccaggcgcgattgccgacctgtacaagcatgagttcgggccgctgttcgacaaggacccgggctaccacagctttacgtgggacagcttgcccgcgctgtttttggtcagcccggagatcgtcaccgaatcccgcgatttgtgggtcgatgtggatgccaccttcggcgccgactacggccgcgcactgggctacaagaaaggcgcaccggtgggcacgcagaaagccaaagtggtgttcggcgtggaccagaaaaaattctgggacggctacgtcaacctcgtgacgctgccaaccccggtcaaacactgaccggctgatcgctcccacaggacgtgggagcgaccttcactcagtccgccaaggcaaacccgcgctgcagatcttcaatcaacgccgccacatcctccaggccgatatgaaggcgtaccaccggattgagcgagcgatccgccgcgctgtcacggtcctgcgtatccgccacagtcaccaggctttcataaccaccccacgaagcgcccaagccgaataactgcaaaccatcgataaaacgctcgaggtacgccgggtcgaggctgctcagttcaaacgacaacaagccattgctgccggtaaaatcccgacgccacaatgcatgccccggatgcccgggcaaggccgggtggaacacgcgtttgacctgcggctgcgcctgcaaccattgagcaatttcgagcgcctgacgctcgtgcacatccagccgtgacgccagggtgcgggcgccgcgcaggatcaggtaggcgtcgtcggcactcaccgcgttgccgaaggtgtcgctcatccgacccagcgccggccaggctgcttcggtggtggacacgctacccatcatcacatcgctgtgaccgcccaggtacttggtcagcgccatgatggaaatgtcggcgcccagccccagcgggcggtacaggtagcccgagccccaggtgttgtcgaccgccagcagaatattgcgcggtttgcacagcgccgcaatcgcgggcaaatcacacagttcatacagcagcgagcccggtacttctgcgtaaacaagtctggtgttgggttgcagctgcgcttccagcccgtggccgtccggcgcgaaatagctgacttcgatgccaaacggttgcaggaattcgcgagccagtttgcgcaccggcgaataaaccgcgtcggtgatcagtacatggtcaccggggcgcagataggccaggaacacctgcgccgcggcggcgaggccggtgccataaaggcgtgtgcgaaagccgccttccagctcggtcaccaggtcttcaagcgcataggctgtcgggttgccgcgcgcgccgtagctgagcacgcgctcactgtcgcggcgggcacgggcgtcgcgcatttgtgcgaggttatcgaacagcacggtgctcaggcgcgtcaccggcacgttgaccgcgcggccgcccccgcccttttcagtgcgcgcggcgtggatcaagcgggtccgcacccgagaaggcgtagccagtggcttgaggctggcgatttccgccgcgctcatctgcgccagcaggccgatttcccaggccagatactggcgtgcagcgtccttgttgccgctgtggcggtcgtgggtgaagaacaggaagtcgatgcactgtgagtccggcggggtttgcgcgtcttcgatgacggccaggccagctgcggcccaggcagcaaaactgccgtccagcaaccttgcacccagcccctgggcagcaaaagcggccaacgccggatcatccgccaccaccaccaacaggcgatgatcggtgttgagccgcgaccgaatcgaccattgcgaacctggaatatgccctttgcgaaacaccatgctcgggcgcaggtcgatcaggttgacgtcgttcaactccagcgccaaagcctgggcgctgatcagcggcaacggcgcatacgccaccggctgcaacaccggcagcgcgagaccgctggcaatgccgccgctcaatacataggcttcatgccccagctggcgcagccagctggccacaatcggtgcgcgcacgccgtcgctgtccaccagcaccacccgtgcctggcgcacgccgatatacagatcggtggactgaatcaactgcccgcccggcgtgtgttgcgcgccgggcaatgtgcccagggcgaattcctcagcggtgcgcacgtcgcacaaaaacaggctgcgttgcgcgtcatcggcccactggcgcacctggtccgccgagacattcaccacgcctgcccgctcggccagttgccgtgcggcctgccgctgctgcgccaggtcagtgctgacctgctcggcataacgccgggtactgccgtgttccagtttgaagtcttccaggtaccaaccctgagtgccgttttccaacgcgtagatcgggttcttcaagcccagattgatcagggtctgcgcgccgatgatgctgcgggtgcgcccggcgcagttgataacgatgggcgtgctgtcatccggcaccaggtcatgcacgcggtagcctagctcgccattcgggcagcagatggagccgggaatggtcatcttgcggtactcgtcgaacggccgaccgtccagcaacaccagcggctcgccgtttgcctgccattcggccaactgcctggcggtgatgtgaggcgtgtggctggcttcttccaccaactcgccaaaggccttggacggcacatgcaccccggcaaacaactgcaagccagcggcctgccagccatccgcgccaccttcgagcacgtgcacacggctgtaacccagggcatgcaaacgctcagttgtgcgcgccgcgacttcaccgccgtcctgatcgtaaatcaccagccgtacctgcgggttgggcgccaggcggcgtacttccagttccaggcggctatagggcaggttcaccccgtggaacaggtgggcttcaccgtattgcccatgctcgcgcacgtcgaatacggcgatttcctgcccgtcgaacagccattgctgcagttgacttggggtgatggtctggctcatggaagtcccaacaaagtaagaaaagagttactgcaacgccaacgaacgctcgcccggcgccacttcgcgacccttggcataggcacgctgcacagccggccgcgctttgatgcgctcacgccaggcctgaatgtgcgggtaatccgccaggtcctggccttggcgttgcggctgaatccacggaaaaatcgcgatgtcggccaccgagtattcacccgccacgtacggcaactcgcccaggcgctgctccagcacgcgatacaggcgcgtggcttcggcgttcagcaggtcgagggcgaacgggatcggctcgggcgccttctccttgaacacctgcaactggctgaggtacggggtgatatgcccgacttgccagaacagccattcctgcaccttttgccgctcggcactgccggcgggcggcaggaattgcccggcgccgtcggcgaggtaattgaggattgcgccggactcgaacaggctcaggggcgtggctgtacggtggtcaacaatcgccgggatacgcccgttggcgctgatgcgctggaagtcggcctgtttctgttcaccttcgcggatgttcaccggcagcaggcggtattcaaggccaagctcttccagcaggatgcctaccttcaagccattgcccgtgggccagtaatacagatcaatcataaaaaacccctgaagaaactcgattcaccctgtgggagctggcttgcctgcgatggcatcaccgcgatgcatcagatgcaccgcagcgcctgcatcgcgggcaagcccggctcccacatacagcagccccggcattgctcaggcgtaggccttgatcgacggcgccatctgcgaggcgttgtagttgaggatgcggccgtcggcttccacgccgtaccggccgttcagcgactccagcggcaggccatagaggtggaagtgcaaggtcgcctgctcgccctcaaccttgatgccatgcaggtcttcgcccaggaacgagatcgacgtgcccggctgcacaatcacttctttttccaggctcaaggtcgtgaaacccggctcgcgcccttcatcattgcgcgcgtagacgtagttgatttcctggccttcgatggcgctgatgattgcccaggtctcgtggttgtgcgcgatagtgcttttgcccggcagcaacgagttcaggtacagcgtcggggtatcgccatcgtcgttcagccgatagcgaaacgcggtactgccctgccccggcaccggtgcggggaattcgtcaaagttgaacagatcacggcgctcggccagggtttccagcaggctgacgatttccaccagcgccgcacggtctacgccacgctgattaatgacgcggatctgctgcaggaacgcctcgatcacgtcggcacggttttcagtactcatcacgcatttcctcttatcagacagacaggctgtatcggctcaaattggtcaacaggtacgggtcgtgctggatcgggccacggcgcccggtatcgcccaacgcatggcgcaggaacgtctgggtgcgttcgctggccgggttctggaaaatctgcgcggcgctgccatgctcgacaatcacgccgttttcggtgaagtacacgacgtcgctgatctcttcggcgaagcgcatttcatgggtgaccagcacacaggtcatgccctcttcggtcagctcgcggatcaccgtcagcacttcgccgacggtttccgggtccagcgccgaggtcacttcgtcaaacaggatcagttccgggcgcatcgccagggcgcgggcaatcgccacgcgctgttgctggccgccggagagctggccggggtaagcgtcggccttgtgttccatgcgcactttggccagcagcgcccgcgcgtctttctcggcgtcggcacggttgcgccccagcaccttgcgcggggcgatcaccaggttttccagtaccgacaaatgcgggaacaggttgtattgctggaacacaaaccccacccgtttgcgcagctcgatgcgctgggcttcctgggccagggtctcgacccgggtttgccctacgcgaatgctgccgcgctggggctgcaacagcccggtaatgcagcgcaaaatggtcgattttcccgagccggacgggccgatgatcgacaccgcctggcccttcagcacgtcgagatcgatgcccttgagcaccgggttggtgccgaacgacaggtgcacatcgcgcaggctcaccaggggttcaatagaaggcataacggcgctccaggtgttgggtcaggcgggaaatcgggtagcaataggcgaagaacagcaccagcaggctcaggtagatcaccacggtgaaaccggtcatgttcacggtgttgctggcgatctgcgcggtgtcgatcacgtcgtgcacgcccaccagcgaggccagcgcggtgcccatggtcaccaccgcgtagaggttcatccacggcggcaacatgcgtttgaagcactgcggcaggatgatcgaacggaacagctgtccacgggtgaaggccaacgaacgtgcggcttcccactgcgtactcgggatcgaaccgatggcgccccggaagatctccgccacgttggcgctggccggcaaggccaaaccgatagtgactttcacccaatccggaaacgacacgtagttgctgccgatatgaatttcgaacgggaacacgtaagtcgtgaagtagatcaacaccagccacggcgcattgcgaaacacctgcacccatacgcgcgcgacaatcccgaccggcgacagtgccagcgcgccaatcaacaggcccaacaccgaaccgatggcaatcgccaccacgctgatcaaaatgttctggccaaagccggccaccagcgccggcgaccattgcagcaacgccgacagcaccgggaatgaatcaatggccatagccgggcatcctcaggcgcgcttccagccagcgccccacgcaattgacggtaaaactcagcaggccgaaaaagctcaggatcaggatcatcagctccagcacgttgtcgctctgggtccagatcatgatcgcggcgtaggtgatatcgcccacggcaatggcggacgccacggcagtcatcttcaccagatcgatcaggttattgatcagcgacggcagcgcgaagcgcagcgccagcggcaactgcacattccacaataattggcggctgctgaaggccagggaactggcggcttccagggtgacggcgggcaccgcttcgatgccggcgcgcagggcttcggcatggaacgcgcccttgtgcagggaaatcacgatcaccacccaggcaaacggcgtcagcgggttggccgcgccgaccgcctgggtcaggagcatgttcagcaccagaaacgcgcagtacagctgcaccagtgtcggcgtattgcgcgtgacctcgataaatacccgtgccggcttggccagccacgggttgcccgaagtgagcatcgccgccagggaaatacccgcgacgaggctaccgatgatggtgaacaggcacagcaagccggtggtcaacgcgccctgcaccagcgtgccgcgctggtaggcatcgagcaggaagttgtagttcaggccgatgctcgcggcccaatggacaaacccttccatcattgcaagtttccgcaagctgtcgcgatgcgccgcccggcttccgccacactctcggtcgcggtggcgatggacagccggaaccacggcgacaggccataggcgctacccgccacaccggccacgccctcttccagcagccaggcaaccaggtcttcgtcgttgttgatgcgcagcccatccgggcgatgacgccccagcagcccggcgcaacgcacaaagacgaaaaagccgccttggggcgcgaggacttccaggccttcgacggtttccagggtcttgaccagaatgtcgcgacgcaactgataggccgccacctgctccgcgaggaaacccaggccgccgttgtaggccgccaatgctgccgcctgccccaccgaggaagcaccggacgtcgattgggattgcaccacggccatggcgtcggtgaggtttttcggcccggcgccaaagccgatgcgccagccggtcatggcgtaggtcttggacacgccgcccaccagcaggctgcggtccagcaagtcgggggcgacattcaacaggctttgcggcgggcgcccgtcgaagcggatgtgttcgtacagctcgtccagcaggaccagcacgtgtgggtgacggcgcagcacgtcagccagctcacgcaactcggcatcgctgtacaccgcgccgctcgggttacccgggccattgaggatcagccagcgcgtgcgctcggtgatgtgttgctccaactgggccggcagcaacttgcagccctgctccagcccgcattcgatgaatacaggcgtaccaccattgaagcgcacgctgtcgggaaacgacggccaatacggcgtcggcaccagcacctcatcgccgtcatccagcgtggcggcaaacgcgttgaagatgatttgtttggcgccgttggcaatcacaatggacgacagtggatagtccaggcgattttcctcgaccagtttgcgttgcaccgccaggcgcagcgccttgacgcccggcgtgggcgtgtacttggtcgcacccgccgcaatagcggcataggcggcttgtttgatgtgctgcggcgtgtcgaaatccggctcgccggtggtgaggtcgaggatatcgcggccggcatcacgcagttcagtggcacgggatttggccgccgcattggccgacagcgacacccgctgcacgcgttgggacaggcgtacggtcatggctgcacctcgaggactttgccggggttaagcaggttgtgggggtcgagcgcctgtttgatgcggcgcatcaagtccagctctaccgggcttttgtagcggctgagcatgccgaccttacgctggccgatgccgtgttcggcgctgatcgagccgccgtgggcgtaggcgctatcgtgcaccagggcactcagttcggcgtaatgggccatgtgcgcctccacggtcgaatccagcggatgggcgacgttgtaatgcaggttaccgtcgcccagatggccgaaggtgaagttgcgcacaccgggaaaatgctgctgcaacagcgcatcggtatgcgcaacgaaggccacgacctgggaaatcggcaccgagatatcgtgcttcatgttgcgcccggcgcgcttctgcgcctcgctcatgttctcgcgcaacagccacagggcctcgctctgcgccaggctttcggcgatcaacgcgtcactgatcagctgtttttcgaaggcatcgcccagcacttgttcgaaggcctcgcgcgcgtggctttcgctgctgttgtcagagagttcgatcaaggcaaaccacggctggctggcggttttaaacggctgcgggcattgcgggaattggtcgcgcagcaaggccaggcaatcagccgtgagcaattcaaaggcggtgaggctcgcgccaaaaccggcgcgggcatgggacaggaacgccacggcctgggccagttcatcaaaggccagcaacgcggtggcctgggccttgggcagcggaaacagtttcaaggtcgccgccgtgatgatccccagcgtgccttcgctgccgatgtataaatcgcgcaggtcatagccggtattgtctttacgcaagccgcgcaggccgtgccagatctcaccttcggcggtcaccacttcaagacccagcgtcaattctcgggtgttgccgtaacgcagcacgccggtgccgccggcattggtgccgaggttgccgcccagggtgcaactgccttcggcgcccaggctcaggggaaacaggcggtcggcgttgcgggccacttcctgaacggtttgcaggatgcaaccggcttccaccgtgagcgtgtcgttatcagtgtcgacatggcgcacgcggttcatgcggtcgagcagcagcagcacggaacgcccgctggcgtccggcgtcgcccccgccatcagcccggtgttgccgccctgcaccacgatcggcgccttcaaggccacacaagcgcgcaccaccgccgcgacttcttcggtagtggccgggtgcaccgccgcgatcacctggccggtatagcggccctgtttgtcggtcaggtagtgcgccgcctcttcactcgtttgcacatggcccgcgccgagcagttgttgcagggtggcgaaaagcgcttcactcatggctgtactgctcgtgcaggtcacgcagggcctgggacggcgccatgccggtgcgctcgccgagggcgatcaggaagccgcttttgtgccactcgcgcacgatggcgtcgagtttggcctgggtgtcgtgctcgcccttgcgaatccagatcaccgatttggacgggatcaggtcgcccggcagcgggatttcataaccttgccattcggcgtcgccgagcagcgcgtgcatggtcgggctgacgtgcaccgcagccacacaaccattgccacgcagcgacaacagcgattcggactggctgcggaacgccttgatctgtgcgccgtaagtttcttgcagcggcttgatgaagttactgccctgggacacgcacaccggtttgtctttcaagtcggcccattgcttgatgcctgcacccttgcgaatcagcgcggcgccgccgacttcctcatacggcgtgggcacgtaatcgaggatctcggcacgctcttcggtgaactgcatattggcgatcaggatgtcgaccttgccctgttgcaggaactgcacgcggttgggcgccagtaccgacacggtcttggtctccacccccagcgcctggccgatgcctttggccagctcgacgttgtagcccaggtgttcgccggtcttggggtcgagggtgccgaacggtgggccgctgaggatcacaccgacgctgatggcgtggcgttgctggatcttgtcgagggtggcgtcggcgttggcgaagcccgcgcacaaggccaggccgagcgcggtgaaggttttcaggttcatgctcaggcgcctttgaactgttgctgcaattccaccagcgcaggtgacgccgggctgatgcggttgcgggtctgggcctcgatcagccagccactgcggtgcagttccttgacgatcgggtcgagtttggcctgggtgtcgctttcgccgcgacgggtccagatcaccgatggcgccgggttgagttccgggctgatcgcgcggtaatccttccattcggcgctgtcgttgatcagcgggttgatcagggtggagtcatgcacggcggcgacgcagttgttgccacgcaaggccagcagcgattcggaggagcttttgaacgccttgatttcggcgccgaactcggtcagtggcttcacgtagctgctgccttgggaggtgcacaccggctggcccttgaggtcttcccagcgggtgatcttgctgtctttgagcacggctgcggtgccgccgatacggtagaacggcgtcggtacaaagcccaggatttcaccgcgctcggccgtccattccatgttggcgatcaacaggtcgactttgccctgttgcaggaactgcacgcggttggccggcagcacgggaacaagctgcacctgggccttgagctgacgcccgagttcgttggccaggtcgacgttcaaacctttgggttgctgggttgccgggtcaatgctgccgaaggggccgccggacaacagcacgcccaccaccagcacatggcgctgctcgatcttgtccagcgtcgcgtcggcttgcaccgccgcactggcgcccaatgcaatcatcgaccccagggccaccggcaaccatttcttgaacatcattggacttccccctggcgaatgatcggcgtaccccgacctgatggaggggcatgctagggagagtgcgggggcaacggaaatgcaaatatctcatatcgttataacttgctgcataagggcgacctccgcttttggaataacccactatttacgggcttcgacaaaaaatcatttcaccaacacatcaggatctgtaatgtttaactttacacatttgatataaaacgcctctggaaatggccatgtcgacccttgatctggaactcctgcgcacctttatcgccgtggtcgaccaccacagcttcgccggcgccggcacccacctggcgcgcacacagtcgtccgtcacgcagcacatgcagcggctggagcagcaagtgggtgtgagcctgtttgaaaagcgtggccgccagaaacaactgaccgagcccggcttgcagctgttgcggcatgcgcggcagatgctgtcgctgaatgacgacgcgttgaattccctgcgcgaaagcagcctgagtggggtgctgcgcatcggttcgccgcacgatattgccgacacgatcctgccgccgatcctcagccacatcgcccgctcggcgccgcgcttgcggctggagatcgatgtggggcgcagcccgtttttgatggatgacttgcaccggggcaaggtggacatggtgatttccacgcgcgccgacccgaaccttgaggggtttgcgttgcgcacttcgccggtgtggtggatttgttcggcgcagtacattcaccagccgagcgagccgttgccgctgattttggtggatgagccgagtatttatcgacggtatgcgttggaggcgttggagcgagcgaatattccctggcggcaggcttatctggcgtcgaatttgattgggattaaagcagcgacccgggcggggttgggggtgacgccgcgcagtatggagatgcttgggccggatatgcgggtgttgggggaaacggatgggctgccccggctgcctgaggtgacgtattacttgtggattcggccgaatacggcgaacccgattgcgcgtaaggcttatgacttgattcgggggagtcaggggttgtaaggcaaagcggtccagtgtgggagcgggcttgcccgcgatgagggggtgccagccaatacatttggcactgatacaccgcaatctcgagcaagcctcacaattggatatgcgtctatcagggagaccgaagtctgcgatagcagcaactgggtatgcctgatgcaccgaggtgtctgtatcgcaggcaagccagctcccacagaaaagcaaagccgaacgcggtcaaaaatgtgggagcgggcttgcccgcgaatgcagtgtgccagttgatagattaattggctgacacaccgctttcgcgagcaagtcgaatcgtcgcaccgccgctcccacaattggatctccatttcgtctgggagaacgcaatctgctctagaaaaaaacaacgcttttgatccaaccactcaggtcggctactaggccgccttgctttagattttgatcttgatctgaggcgccccattaaacacgctggccgaacgcaggcttgaatccgggggtaacccggcaggacgccgggttagccgcgatgggccagggatggcccatggcggcggcccacggattcaagccttcgttcgggcacaccgagcctaagcgaggtgccgagtgtaggggcaagagcgtttggttactttgcgcttttcaaagtgacccgccgtaagggcggaacccatactcgccatcacacaaataatggctatgtactccgaaaagccccccccaaaaaaaccatcacaccacccatgccccaacccacttgtccaatcatggccctgttgacagccgcacccgtcgccgaaaataacgcatcccttaacatccacaaggatgccccatgaatgaccacgtcgaatttgtgcacctcgaaaccgcggccgattgcctcgccagctttgcggtgatgcagcaactgcgcccgcacctgaccgacgcgatgggtttcgccgagcaagtgcagcgccagcgccagaacggctaccgcctgctggccgcccgcgaacacggcaacgtcatcggcctggcaggttaccggctcaccgaaaacaccctctacggccgtttcatctatgtggatgacctggtggtggacgcctccttgcaacgtcggcgcctgggcgagcaattgcttgaccgggtgcgtgaggaaacccgtgccctgggttatcgctggctggtgctcgataccggcatgcacatggccctggcgcagcggttctatttccgccaggggttgttgccgttgggcatgcacttctcccaggacctgggccaatgacccgcgccctgctgttaagcttcagcccccacggcaaggctgcacagacattcaagctggctcgcgcactgcttaaggacctggtgccgcaggctgaggtcactgaacgtgactacggcggccaggcactgccaccgttgacccgcgaatacgccaatgccctgactacgcccggcggcctgagcggcgacgcaacgcagctgtccgaacagctgatcgtggagctggagacctgcgacctgctgatcatttgcaccccggtgcacaatttcaccctacccgccgcgctcaaaagctggatcgaccatgtggtgcgcattcaacgcagcttcaccgtcacgccccagttcgaaaaagtcgggctgctcgacgaccggcgcacctttgttctggtgagttccggcaactcgcgcaagggccatgagccggactttttgacgccttacctgaccgcaatcctgtctaccgtgggcatccacacggtggattttgtctacctgggcgccatggtacgcggggaagaagcggtccatcgctcactggagcaggctcatcggcaactgtcggcagcaatcagcgctggcctataaaattaatggcgctagaatcggcgccattctttacctgcctccctgatacgagccccccatgagctttgatttcgacacgatccacccacgcctcggcaccggcagcaccaagtggaaccgttacccgcaagacgttttgccgatgtggatcgccgacatggatatcgccgcgccacccgccgttctggccgccctgcacgcccggctcgaccagcagattctgggctacagcgtggcgggcccggatgtacgcgaggccatcgtggccgacctgtgggccaagtacgcctggcgcgtacagcctgaagacctgttgtttctgcccggcgtcgagccgggcttcaatatggccttgcatgggttcgtacagcccggccagccggtggtgctgcaaacccccaactaccgcccgatccgcctggcgcccggccactggaacctgccgcgcgtcgaagtgccattcgagctgatcaacggtgagttcgtcacacccatgcccgccctgcgccaggccttgaaaggtgccggcgcactgctgctgagcaacccgcacaacccgatgggcaaagtgttcccgcgtgaagagctgctggccgtggccaacgcctgcctggaaaacggcgcgttgatcatcagcgacgagatccacgccgagctgtgcttcgacggccgccgccacattcccacggccagcctcagcccggaaattgcccagcgcaccatcacgctgatgtcggcgagcaaggcttacaacgtggccggtttgaagacctgttttgccgtggtgcaaaacgccgaggttcgcgagcgcttcaacaacgcccgctgcggcatggtcgacagcgtcagcccgctgggcctggaagccacccgcgccgcctacagccaatgcagcgactggctcgacgcgttggtgcagtacctgcaagccaaccgcgattacttgctcactgccgtgcaaacccggcttcccggcgtggtcatgcacgtgccccagggcacttatctcgcctggctggactgcagtaccctgggcctggacgatccacagcgttttttcctggaacaggccaaggtcggtttgagtgcggggatcgagtttggtgatgacagccagcaatttgtacgcctgaacttcggctgcccacgggcgatgctggaggaaggcttgcaacgcatggagcgtgctctgcatcaccgctaggcttcatttcacaacttttcgcaacgtgcacagaacccctgctgatagtgttttcgtcgaatagccccaccgaaaacagcaggagttccacggcatgtcgacccagccgcttgatcgctcgtccgagcctaaaagccttccccgcacgccgaccacgtcgggtgcggaatttcatgtgctgctcaagaacagcgccaataaaaaggtcgagacgcaggacaaaaagccctccgggctggaggccagcaaaaaggacggttatgaactcgccggcaaggacgccacgcctccccctgcattgtctgattacaaagccatcggcccgcccgatgaagtcggcccggggctgattcgttatgaaacccaggacggcaagaaggtcatcgtcagcgaacacgacagcccggacctgttcaagcaagtcagccaggatttcaaatcgctctccggcgtggttgccagtgaaaacgccggctaccagagcctcggcgctgacggcaaggcaccggacaccctcgccgactacaaagccctgggcccaccggatgaaaccggcccgggcgtgatccgctatgaaacccaggacggcaccaaagtcgtcatcagccagcgcgacaaccccgaggccttcgagaaagccaaagaagcctatgaaagcttcaccggcctctccaacagcgaagccgccggctatcgccgcgccaccgataacgaagtgtggccaccctacggcggtactgcggttggcccggtagacgaagtcggcccagggctgattcgttatgaaagcaacggcgaaaaagtcgtggtggcccgcgacgacaaccccaagctgtttgactacctggcaggcctcaacgcggtgtactccgacccggccaaaaaagccgtgattgagggcgaactgaacaacggcgcaagtctggccgacgccaacacccctgtgccgggcctgaatgactacaagaacttcagctggaacaacgaccagaaagacaacatcctcacttacgagcttcaggacggcaccaaggtcgtggtgtcttccgatgtcagccccgagctgttcaagagcgtcgctaccgccaatgacacctgggccaaaatccacaccagtgaagacgccggctacaagctcgcaggccccaatgactttctgaaaaacaccgacatcaccttcggttctcccgacgagctgggtgatggcctgatccgctatgagaccagcgaaggcaaggtgatcgtctccaaggaactcagcccgcagctctacgatgacgtcaaagccaagtgggatgccgccagcgctgcgggcgtggatgacacgcgggccaagcacaacctgccaccggctgccgacctcgatgtgctgaacatggacaccggcgtgcacgcggacgagaaggacgacaaatcgccgaccttgaccgtgagccagttggccaccaccgagttgattgacacctaccgcgccggggtcaaagacggctcgattgccaaggacgacccacgggccaagctggtccgtgccctggaagcccaggccgcctaccagaacggtcatggcatcacgggctacgaagaagaccgccgcccgttcaacaccacctggcgcagttccgatgacaagcagaccgagctgacgtcagccgacatgcacgacatcatcgacggcaaggcggtgcagcagcagatcggcgaactgttcaatgatccgaccgtgcaggccgactacaagtcgaagatggacgacgctctcagcaagctgccgaacaaggatgagatcaaacaaaaactgctcgacctcacctccagccccgactacgtgctgtacctcaaggacctgcaagaccagggcaaaacctccgaggcgcaaaaagacctgagcgacaccctgacctcgctgtcactgtttgacccggccgccgccagcaaagccgcgcagaacattcaggccgatggcttgaccactgacctcaatacgatcctgtctgacccgagcaaggtctccgacgacaacaaggaactggcgaccaaggacctgttcggcctgctcaaaggcgtgctcaaaggcaccctgctcgacctgccacgccggtctcaggaaaccctggagaaattcctcaacgagggcctgcaaggcaaggaaaaatccgccgccgtgaccaaggccctggaagaactgggcgatgtctacaagagcaacggcgtgatcaccgaagccgacctcaagacagccctgagcaagccctacatcccggtggccgatcgcggcatgctcggcgaggtgttccacacgctcaacagcaaaggcatcctcggctccctcggtgccggtgtaacgatgttctcggcgatttaccagttggtgggcaaaggcggcaagctgggggaaacaccggcacagcgcatgtctatcgccaaggacttcctgagctttgccggcggctccagccactttgtgcgcctgggtgacaagattggcgagacattgggcaaaggcggcctggtggacttcctgggcctggacaagaccctgccggagatctggggcaagactggtttacaagagccgaacttcgaatttcgcgtcagtgacatgcccgccgatgtcaagaccaagatggccgccgcgctggattcggtgccgaacagccaatatgacggcatcgccaacctgttcgatggcgacaaggcggttaccgaggccaccgatggcctggcaactcacttggacgacggccttgcagccgcaggcgcggccaaattgggcgcgtccaaatccgcaaaaattgccggttctgtgatcaaggtgctgggcccggccacggacattgccggcggtttcgccgacatcgtgttgggtgcgttggcgatcaagagtggcatcgccagcaaggacccgctggctcaggcagccggtggtttgcaggtggccggtggcgcctttggtgcctcggccggtgtgctcggcgctgcagcgctgttcggcgcaggcacggcggcggcgttgaccgggccgctgtttttggtcggggttgtcttggcggtggtgggcggcatcatcggcttctttgtcgaccacaacaaaaaacagaaagctaccaacgcggaaaacgattggtaccgagacctggcaggcgacggcttgttgcagggggactgggcagaaaaagtcgagtacgcccactacgaaatccaccactaccacggccgtgatacccccaccgatgacagcttgttccgcttccagcaatcggaatgggagcactttgaggagacgccgggtaaaggcggatcgtcgagcaaccgcctggatggcgacttgcacaaatcctacaaggacccggacgcgccaccgccgaacctgccgagcgatgcgccaccggacaagccgcaaccccatcagccgggcggtggcggcgcgaggatcaactgatggcctgacagcttcacacacatcaatgtgggagctggcttgcctgcgatagcggtggtgaatgaaactccgctatcgcaggcaagccagctcccacaggaaagtgtgtcgaccctaaaggtagcgcccgacgttgggtttcgagtttacagcttggcaatagacacttcggtcgacttcacaaaggcaatcacttcactgcccactttcaattccaggtcacgcaccgaacgggtggtgatcactgacgtcacgatgccggacgcggtttgcacgtcgatttcggacaccacttcccccagcagaatttccttgatcacgcctttgaactggttgcgcacgttgatcgctttgatggtcatgtcggctttccttttggctgttgggtcaatccgcacgaatgcgcaggcagtcaaaatgcgctatccaccagaacattaaaaggaatatataactctttatttattctttatggatatatgacaactgtctgccagccaacagctgatcaacaatctgccctttcccacagcagagactgaagctcaaacccccgtcaatacgcttcctgactagatggcacagagactgcatattcccttaaagcatgatggaacatgccatttcaattttctgaatataagaaaagccttctcttgccatcttgcccggagctgttccatgaaaccctttacccaacgctttttgggcgcctgcgcgctcgccctgtgcctgcaaccacaggtcttcgccgccgacaccgatcctgcgcaagtgaatctggattacgcctactattcgcccgtcagcctggtgctcaagcatttcggctggctggaacaggcgctgccgaacaccaaaatcggttgggtgttgagccaaggcagcaaccgctccctggaatatctcaacagcggcggcgtggacttcgcctcgtccgccagcctctccgccgtgttgagccgcgccaatggcagcccgatcaaatcggtgtacgtctacagccgtgccgaatggaccgcgttggtggtgcgcaagggctcaccgttcaacagcgtcacggatttgaaaggcaagaaaatcgccgccaccaaaggcaccgacccttacctgttcaccctgcgcagcctgcaaaaagccgggctgaaaaaggacgacgtcgaactggtgcacctgcaacacccggatggccgcaccgcgctggaaaaaggtgacgtggacgcctgggccggtctcgacccgcacatggccgccagcgaaatccaggccggttcgcgcctgctgtaccgcaacaaggaattcaacagctacggcgtggtcagcgtgaccgagaagtatgcgaaggagcatccacagaccatcaccaaagtactcggtgcctatgaaaaagcccgcgactgggccgtgaaacacccggatgagttcgccaagttgctcgccgatgaatccggcttgccgctggaagtggcaaagctgcaactgtcgcgtaccgacctgagcagcccgttgctgaccgccaaggatgtcgaatcgtccaaggcagccgcgccgatcctggtctctgaagagctggtacgcaaaggcgtgaatgtggaccaggtgattgatcagttgatcgacacctcgtttggccagaccctgccaaagccgtaaggggcgcgtgatgacaagcgaactgcagacattgccccttgctgcacccgtggtcatccggcgtagtgcctggccgagaaggctcaaaggcttggccctgccggtgctgatcctgttgattctggaaggggtggtgcgcatcggctggttaccctcttaccagatgccggcgcccagcgagatcgccatgaccctcgcggacctcgccgaaggcgccctgtggaagcacatcagcgccagcctgttacgggtgctgctgggctttgcgatcggggccagcctggcgctggtgtttgccgcctgggtcggcctgagccgcgaagccgaggcctacctggaaccgaccttcgccgggctgcgctcgattccgagcctggcctgggtgccgttgttgctgttgtggctgggcattgatgaaacctcgaagatcgtgctgatcgcgattggcgcgttctttccggtgtacctcaacggtgttgcggcgatacgggatattgaccgcaagctggtggaggtggggcaaatgtacggtttcagccgcaggcgcctggtccggcgcatcttgttgcctgccgccctgcccggcctgtttaccggtttgcgcagcggcttgagcctggcgtggatgtttctggtggccgccgagctgatcgcggccaccaagggcctgggctacttgctcagcgacggtcgcgaaacctcgcggccggatatcgtgctggcggcaatcattgtgttggcgctgttgggcaaggtcagcgatggcttgctggctgcgctggaaacgcgttgcctggcctggcgtgacacgttcaatggccaaggagcggaaaaatgagtgagcagtcgttgttggacatcaaggtcaagcgtaaaagcttcgccgacaccaccgtgctgacagacgtgcacctggcccttctgccgcgtgaagccgtcagcctgctcggccccagcggctgcggcaaaagcacgttgctgaggatcgtcgccggcctggaaaccgacttccagggcgagctgcgcagccccgaaggcgaagtggcctttgtgttccaggagccgcggctgatgccttggctgacggtggaacaaaacatcggtttgagcgatgacaaccgctacgacaaggcctgggtcacgcaattgatcgaggaagtcggtctcaagggtttcgcacaggcgctgcccaaggcgttgtccggtggcatggcgcaacgggtggctatcgcgcgcggcttgtattcaagaccgcaggttttgctgctggacgaaccgttcagtgccgtcgatgcgttcacgcgcatgaagctgcaggacctgctgctgcaactggccgcccaccatgccatcgcactgttgctggtgacccatgacgtggatgaagcgctgtacctgagcgaccgcgtgctggtgatgggcaaccggccgagcagcattcgccaggaggtgacggtggatttgccgcacccgagggaccggcgcgacccgctgctggccaagctcaaggcggtgtccttgaccgagctgcagcgggcgcatgtgatctgagtggccagcgcgcttacctgtggtgagcgggcttatcggatcacacctgtttttctgacaatgtcacccaaaaccgcgttcgcgcgtgcacttccaagcccagggtggacgccagcaggcggaggatccggtcggtatcatccaggcggaaactgccggtcacccgcagggcttccaggcttgggtcccagcgcagaacgcccggacgataacgctccagctcgcgcaaaaaatctcccagcgcctggttctgcgccgtcaacacgccgtcgcgccagtccagttgcagcacatcaaacgacgcccagtcactcagcccgccgacgttcaaggcggcttgccggccgctcggcaacgtcgccaggtgtccgttcaaatcccgcacctgcaccgagcccttgagcacttttaccaggcatccggaggtcagttgccgcacacacacctgcgcctgaccgacgtccacctgcccgaaacgggtttgcacggtcatcgcagcggcacccggcacattcagcgccaactcaccgtcaaccagggtgacgcgccgctgcgccaggtcgatatccaccgccgtggccgtgttgagttgcaagctgctgccatcggccagaggcaggcgtttgcgttcccccgtggcggtgtgcaagtcggcgcgccaggcttcgatgggcaactggcggctgatcagccaggcggtcggcaccagcgccgcgacacccagggcccgtttgagcagtgcccgccgcgcaggttgcgggcggtcgaggctggccatcgccagggcctgaggcaagtcactgaagcgctggcgcagggactgggctttttgccaggtctgttcgtgttgcggatggctgtcgcgccattgctgcaagtcggcgtaatcacgttcggtggccccgccggactccagcagcgccaaccactgcgcagcggcacgtgcgacctcgcggctcacacctgcacccacaaacaatgctcataagcctgagccatgtagcgcttcaccgtgcgctcggacacctcaaggcgctcggcaatctcgcgataacccaagccttccagttggctccaaagaaatgcgcgacgcacccgcaccggtaaaccgtcaagcaactcatccagggcttgcagggtttccagcaccagccagcgctgttcgggcgacggcacgcacgcttgcggcaagctggccaaagccttcagataagcctgttcaaggctgcgccgctgatgaaagttgaccagcaaacgcttgccgaccgtcaccagatacgcgcgcggctcctgcacgtgcgcaatcggctgggcactggccagcacgcgcagaaacgtatcctggctcaggtccgctgcatcccaggcattgcccatacgccgccgtagccaggtttccagccaactgtggtggtcgcggtacaaactcgacaacgtcaactcgggggcgtgggtcgggacgacagcatcattcatggcaagcaacctgcgcggcgcgagtgagtctcaaatgagattaattctatttaatatcgcgccggcgcaccatgttcatttcaacattgcgtttaaacggacgtctcgccgtcgaataccttcccccgccccaccacgctggcaggcttcaatacagcccccggcgccagtaccgcattggcgccgatccggcattgatcacccagcaacgcaccaaacttgtcgcagccggtgcgctgcaagtgcccgtcaatccgcacctgcacttccttgtcgtcgcgctcattgcggtagttggcgacgatgctcccagcctccaggttgatgccatggcccagcaccgagtcgccgacaaaattgaagtgcgccagcttgctgccgctgaatacaaaagaggttttcagctcggcaccggggccgatgatgcagtgcgcatccagccagcaaccaccgcgcaacagcgaaccactggcgataaagcaatgggcgccgatgatcaatggccccttgagcaacgcgcccgcctcgacggtggccgtgcggtgcatggcgatgtcaccctcgatgacgtattcgtcggccggcaattggtcgagcaattggcgaacgataaccggcgcctgcgctgccagcgcccaaggcgccagctcagcccacggcgcgaggcgggattgggaaaaaccggcaatgtaatcggtgagtcggatcaacgtcgaaccctcgggcgtttggacagggtcggaaaattagcacgccgccggagacaaacgcatctttactatttgtcttgttatggatattttatctacaaatgcacacgaggcccgcccatgcaatcgcccagctactcagacgtcatcgatgccgcccagcgactggagggcttcgcccaccagacgcccgtgttcacctcgcgcaccctggacgccgaaaccggcgcccaggtattcatcaagtgcgagaacctgcaacgcactggttctttcaagtttcgtggggcgttcaatgccctgtcacggtttgacgaacaacagcgcaaggctggcgtggtggcgttttcctcgggcaaccacgcgcagggcatcgccctggcggcgagcctgttgggaatgccagctaccatcgtgatgcctgccgatgcgcctgcggccaaggtcgcggccacccgtggctacggcgccagtgtggtgctgtatgaccgctttaccgaggaccgcgagcaaatcggccggaccctggcggttgagcgcggcatgacgctgatcccgccttatgaccacccgcacatcctcgccggccaaggcacggccgccaaggaattgctggagttcaccggcccgctggacgccctgttcgtcggcctgggcgggggtggcatgctctcgggtaccgcgttgtcgacccgggcgctggcgccggattgccagctgttcggcgtcgaacccgaagccggcaatgatggccagcgttcgttccagagcggcagcatcgtgcacatcgataccccggcgaccattgccgacggcgcgcagacccagcacctgggcaaccatacgttcccgatcattcgtgaccaggtgaacgacatcctcacggtgtcggatgccgagttggtggcttcaatgaagttctttatgcaacgcatgaaaatggtggttgagcccaccggctgcctgggtttggcggcattgcgccaactgggcgagcggttcaaggggcagcgcgtgggcattatcgtcaccggcggcaacgtggatatcctgaaatacgccgccctgctcagcgaggcgtcatgaacatcatccacacgcccgctgccgcacaacccgccgggcattacgcccaggccgtacgccacggcgataccctgtacatctccgggcagttgccggtcagcccggacgggcgccatcacctgtcggcgtcgtttgccgagcaaacgcaagtggcgctgaataatctgctggcgatcctgaaggctgcgggcggctcgcctgaagacttggtgaaggtcactgtctacgttgcagggatccagcactggccggaattcgaccgggtatacgccgccgcactcggcgatcatcgccctgcccgcgcggtggtgccggtgccggaattgcatcacgggtatctggtggagatcgaagcggtggcgcgttatttggcgtaggtgtagaccgccgcgcgcgacacaccgaggtgcgaggccacggtctccatggcccggcgaatgtccaggcagcccgagtctttgagctcttgcatcaacacgcgacggtccgccgtcttcaacgcacgcggcgtggtggccaggcgagcggcgaacttgtcgatacgcgcgcgaatcgcgtcggcgccggaggggtcgagggagtcgttggggttgtcgccgctgagcgaaccgaactgctccagcatgccttgcaagccacggaacaatgacaggtcgacgttcatgcacaacgcggcgacgtactcgccgctgtggcccttgatgccgatcgaggtgctcttgacctggcgcccgtcgctgaactggttctggtaattggcgatgacctgggtgtattccgggtccgcaatacgcgccaggcccagcgcagtggccggttcacctggctgacgcccggagaggttgttatggatcgccaggatcgcgtgctgcgggtcgcgcaaatcgtgcagcaccacttcgcagaacgggctgaaggttttgctcaagccttcagcaatctgttcgagttggcctatcagatgagtgtcttcggtcgaggtctttttcatgcaagacaacatatccagtcatggacagggcgtcaatttcggcgctgtccctcattgtggagctttaaccatggacactcctgccgcactgcttgatgtggtgaagatgcagcgcaatatcgcgcgcctgcaacaacgcgccgaccacctgggcgtgacactgcgcccccatgtcaaaacccataaatgtgctgaagtggtggctgcgcaaatcgccgcaggcgcccagggcatcacggtgtcgacgctgaaagaagccgagtattttttcgcccagggcattaccgacatcctatacgccgtagccatggccccgcacaaattgccccaggccctggcattgcgccgcagcggatgcgggttgacgctgatcaccgacagcctcgcaggtgcccgggccatcgtggattttggcaagcaacaccgcgagacctttgcggtgatgatcgaaatcgattgcgacggccaccgttccggggtcaagccgcaggatccggtgttgctcgagatcgcacgtttgctcggcgacagcctcgcgggcgtgttgacccacgccggtgaaagctacggcctggacaaccccgaagccttgcaagccattgccgagcaggaacgcgcacgctgtgtcgaggccgccgaacgcattcgtgcagccggtatgccctgcgcccgggtcagcgtcggctccacgcccaccgcgttgtcggcacgcagccttgagggcgtcaccgagctgcgcgctggcgtctatgcatttttcgatttggtgatgcacaacatcggcgtatgcggcattgatgaactggccttaagcgtgctgaccacggtgatcggccatcaaccggaaaaaggctggatcatcaccgatgccggctggatggcaatgagccgggaccggggcacgcaggctcagaaacaggattttgggtatggccaggtgtgtgatgaacacggcctgccgattgaagggctgttattgagcagcgccaaccaggagcatggcgtggcacagttccaatcccgccaaatcgatgtggttgcacagtttccgctgggtacacgcctgcgcgtgctgcctaaccatgcctgtgcgacgggggcgcagttcggcagctataacgcactgctggagagcggccagattcaggactggccacggctgcgcggctggtagctcaaacatcgttccaatgtgggagctggcttgcctgcgatagcggtgtctcagtcatacagatattgacagtgcaaccgccatcgcaggcaagccagctcccacacaaaccagctctcacctttaaccagcggtgttctcaggcatcctgcagaatcaaatccgcgcccttctccgccaccatcaacaccgccgcatgggtattgcccgaggtcacattggggaagatcgacgcatcgacaatgcgcagcccttgcaacccgtgcaccttcagacgcttgtccaccaccgacacttgcgggtccgagcccatggcgcaggaaccgcacaggtggtagatcgagccgctgttttcgcggaagtattgcagcatctgctcgtcggtctgcaccgctgtgccgggcaggatctcggccacggtgatgcccttgagcgccggcgcctgcatgatcttgcgcatcagccggctgccctggatcacctcgtcgatgtccttctgggtgctcaggtagttagggtcgatcagcgccgcgtcgcgcgggtttttcgaggcgatgcggatggtgccgcggctggtcgggcggcacgggttgaagcacagcaggaagccggaatagggttcgggcttgaggctggccttgttgtttttcgggatctggtacgacagcgggttgaagtacagctgcaggttcgggtcggtctgttggtcattgccgcgaaagaagccgccggcctggttgacgctcatcgccagcgcgcccttgcgggtgaacaggtatttgaggccgagtttgagctggccgaacagcgagctcagctcatcgttcaaggtcgggatattggccttgtagtagtagctggcgcacaggtggtcttgcaggttttcacccaccgccggcaggtgtttgaccaacggaatattgtgctcggccagcagcttctggtcggccacgccggacagttgcaggatcttcggcgtgtccacagcacccgcgcaaaggatcacttccttgcgcgcagtgaaggtgcggctcacgccatgctgggtcacggcaatgccggtggcgcgctgctgatcgtcgaacagcacacggtccaccaaggcatgcagctccaccttcaggttggaacgcttcaacgccgggtgcaggtgcgcaaagctgctggaactgcgctcgccattgcgggtgttgacgtcatacaggcccgcgccttcgaagttcgggccgttgaagtcgtcgctgtgggcataccccagttgctcgcaacccttgaggaacacgtcgcagatcgggtgggtctggcccttcatcggcgtgatgctgatggggccgctgccgccgtggtattcggtatcgcccagcgggtggttttccagcttgcgaaagtacggcagcacgtccgcaaaaccccagccgtcgttgccattggccgcccagtcattgaagtcatgggcctggccacgcacgtagatcatcgcgttgatcgaacccgagccgccctgaaccttgccgcgcggcgcgtagatttcacggcccgccaactgcttttgcggctggctgtagtacatccagttgaaggtcgggttgtaatacatcttggcgaaaccgaccgggatcttgaaccacagggaactgtccttgccgccggcttccagcagcaacacggagtattcgcccgaggccgacaaccggttggcgagcacgcagcctgccgcgccggcgccggcgatgatgtagtcataggtcattacagttaccgcatccgtcgttttattagcccttggcgggcgaagtgtctttcacgtcagccggtgtcggcgccatttgcaggtgcaggcgttcgccggtgtagggcgtgtgcttgcgcaccacgtccatgttcagctccacccccaggcccggctcggtggacgggatgatgtagccgtcctcccattgcagcggtttggtcagcacttcggcgtggaaaccgccccaggtcatgatgctttcctgaatcaggaagttcggtgtgcaggtcgccagctggaaacttgccgctgcgccaatcggcccgttgtacaggtgcggtgcgatctgcgcgtagtaggcctcggccatgctcgcgatcttcttcgcctccagcagcccgccgcagcgcgccacgttcatctgcaggatcgacgcgccaccggcttgcagcagcttgaagaattcgtacttggtggtcaggcgctcgccagtggcaatcggaatactggtcttggccgcaacctgggccatggcgtcttcttggcctggcggcacgggctcttcgaaccacagcgggtcgtatttctccaaacgcttggccaggcggatcgccgacgacggcaccatctgcccatgggtgccgaacagcaggtcgcacttgtcgcccaccgcctcgcggatcttgcggcagaaggtttcgcaacgctccagcacttccagcgagatctgatgacccgagtacgcggtgtacgggccggccgggtcgaacttcacggcagtgaagcccttgttcatgttctcgatggcgcactcggcggccaggtccgggtcgtcgtagtcgtactcgcccttgctgttgaccgggtacaggtaggtgtaggaacgcaggcgctcgttgaccttgccaccgagcaactcatagaccggcttgttggcggccttgccgatgatgtcccagcaggccatttccaggccgctgaccacgcccatcatggtcaggtccgggcgctgggtgaagccgctggagtacgcctggcggaagaagcgctcgatgtgatgcgggtcatggttgagcaggtagcgctcgaacacatcctcgatgatcggcagcatcgccttggggccgaaggtggcggcgtagatctcgccgacgccttcgatgccgcagtcggtcttgagcttgacgaacagccagtacatgccgccgatgtgcggtggcgggacagcaacgatatgggtttcaagggcgacgattttcatctcaggcacctgtctggttgaattttttacggttgattcgggcgcgcagggtcaaggccgcaagggtgccgagcacgccgatgaaggcgatgtagccgaaatacaggttgtaaccggccttgcccgggtaggtgtcggtcaggtagccgttgatcagcgggatgaacgtgtcgggcaggtaacccacgaccgaaacgatgccgatggccagcccggtaatgcgcagcgggatgtcacagctgtcgaggattgcccagtacaggccacggatcgcgtaggtcatcaaaccgatgaaaatcaccgtgccgatcagcaggcccaggctgttgaacgccgggaacacgatcagcccgaccatcgccagggtcaccagcaccagggcgacgatcagcaccgagatgttcgaaaacttgtcccccagccagccaccgccgatgccgccgatcgggcgcatccacagtttgatggtggtgatggtgccggccatcacggcagtcatgccgctgccttgcaggtagtccgagaagctgtaggtggcccagaacatgtggtaaccgcagaacacgatagccgtcaccagccacagctcgggaattttcaccagggtggtcaggtcggcgagcaggttgaacttgcccttctgtaccgccgccgtttcttccagcgatttgggatccttgagcaacaccaggccgcaaccgatggcgatgcagatgaacgaatacagatacaccacgtgcttgaagccttcagccgctgtctggctgcgggtttcagtggcgtaggcaaacaggccgagggccacggtggcgagcagcgcttcaaccaggccgcgaccgccgtcgaggatgccaaagaaacggccctgctcgctttggtgggcaatcatcttcacgcgcttgagcaccgaggcccagaacgtcaggccggtggtcaagccccagcagccgaagatgatcatcaagccggtcatcgacggcaccgtcgagtaccaaatgcccagcgcgccagtggcgaccagtgagaagaaaatcaggaaacgcggtggcaagcggtcggccagccagccactgggcaggtagctgagcaaaaagatcgtgccgagcatcgaatacaggtagcccagctcgctgtggttgatgtggaacacttcgagcatggtggtctggtagacctggcgcaggtagaggatcgggtagatcgcccctgcggccagtaccagcaacagcaattggaagtagcgactggctttgtcgctgtttgccgcagacacggcaacggaaacctgggcaacgggtgcaggcttggacatcgtgtagacctcaggcacccgatgcgcgggtgccctgataattgtttttattaaaggtgcagcgggtattcgtggatcagtacttcatgaccaccaggcgggtctgggtgaattcaagcatcccgtgcttaccgtcatcaccgcccagccctgagcgcttccagccggcgtggaaaccctgatacgggtccgccggtgtgcgattgacgtacaactcgccggcttcgatggcattcgccactttcatcgccgtgcggtagttctcggtgtaaagcaccgacgacaggccgaactgatggtcgttggccatggccagggcttcatcgatgtcgcggtacttgagcaccggcagcaccgggccgaagatttcttcctggatgatttccatgtcctggcggcagccgctgagcaaggtcggcgggtagaaatgccccggcccttcaggcagcacaccgcctgcttccagtacagcaccgacggcgaccgcgcgctcgaccatggcgtggatattcttttgcgaactggcgttgaccagcgggcccatcaggctggcgtcggtggcgcggtcaccgaacttcactgcgctgattttgcttttcagcaaggccaggaaccggtcgtagacagcctcgtgcacgtagacgcgctccactgccgtgcacagttggccgcagtgggtggtcttggacgcgacaatagcgctggcggcttgctccaggtcggcatcagcctcaatgatcgccggggtcttgccgcccagttcaagggacggcttggcgatattggccttgcagtaatccagcacgatacgcccggcattgacgctgccagtgagggtgatcaggccaacggcctggtgcgtgcacacgctggcggcggtggcgtggtccatggtcaggatgttgatcacaccagccggaataccggcagtgaccacggccttggcgatttcgaatgccgacaagggcgtattgttgctggggcgcaccaccacggtgttgccggcgatcagcgccggggcgatcttgcgcagcagggtgtagaccgggtagttgaacgggatcaggcaagccacaacgccgatgggctcgcgttgtaaaaagaggttttcgttcggggtgtcgctggggatgatttcgccttcgatgcgccgcgcccattcggcgtggtagcgggtgatctgtgcggcgtagcgggcttcgttgctggcgtcgctgacgcttttgcccgactcgcaggccaaggcggtgccgatggcttcggcgtgggtgtccagcgcgtcggcgaaagcccgcaggtgttcggcgcgctcgatgctggtgagtttgccccaggttttctgggctgcggcggcagcgtcgacggcggcgatggcttcgtcgggggtagcggcgctgacgtggccgatcagggtttcggtggccgggttgtagacggcgatcagggcgtcgctggcgggttcggcgaactggccgttgtagaaattgcgctcgggttgcatgtggtttgcccaacgttgttgttttgcgagtgacatgcagttttgtcgttgttagggggctgggcaaacgacttattgggtggggtaacgtgaggaaaacgaaggttagtgggggtttgggggggcttatccattatttgggtgatggcggatatgggttccgcccttacggcgggtcactttggaaaagccccaaagtaaccaaagggctcttgccccaacactcggcacctcgctcacgctcggtgtgcccgtaatccgacagggatttggggggccgccgccacgcgccatccatggcgcgtcgcggctaaaccggcgtcctgccggtttaccccccaaatccctgtcggattacgggcacaccgagcctaggcgaggtgccgagtgtaggggcaagagcgtttggttactttgcgcttttcaaagtgacccgccgtaagggcggaaccaatatcagccatcaccccaccaacggatatacacacaaaacccaacctcaacccgccgccgtagaaggctccaactgccgttgagccaaccagatctcctcctgcaaccaccgcccaaacacctgcaactgcggcgaatccgtctgctccggccgggtcaccagccagtacgactgatgcccctccacatgcacgttcaacacctgcgtcagctgcccgctcgccagttccgccgcgaccatatgccaatccgcaatcgtgatccccaacccatccgtcgccgcccgaatcgccaagtccagcaggtcaaactcatacccgccctgggtatcgacgccatgaatccgcgccgcgtccagccagtgcttccacgtcagataccgctggtcttcgctggccaatacatgcagcaacgtcatgcgattgaggtccaccccgtcactgcactcacgggcatacaacgacggcgcgcacaccgcaatgtgccgctcctgaatcagcagcgaactgtccagcccatcccattccccattgccgaaccgaatcgcacaatccagcgtgctggtttgcgccaggctgtcctgtaaacaggtggtgatgctcaactccagctccgggtgggcctcgcgcaggcgccccaaacgcggcatcagccagcggctggtgaaggtcggcggtgcgttgacgtgcaaccggttggagtgggttttctgctgaatgctgcgcaccgtcagctcgatcttgtcgaacgactgatgcaacgcccgcagcaacacccgcccggcactggtcagttcgaggtgatggtggcgccgctccagcaggttttcccccagttgttcttccaactgccgtacctggcggctgaccgcgctttgggtcacgttcaacagctctgcagcccgggtaaagctgccggtactgccggcgacttcgaaggctttcagggcattgagaccgggcattttgcgtttcatggagggcactcgacagcggttggcagggatacggcatcccacaacaaagcaggatatttcgtacacaacatacctttttgtatcgagccagcggtagcgccctctgcgcaggcataaaagtccgccctggagcgaaagtgtcgttttccatcgaatgacgtcgctcacgaataaatagcacgcgtattacgcatgcacactaagacaattaagcattggccgctaaaaccgcttaaaagttagtctgctcgacaactaaccctcatgaatcatttggaacttcgccatgtcgaacactgctatttcatcgcggcgaagtattggcctgttggcacttgtatttactgcctgtaatgccaccacccacggtttcagtatttttttgtattcggcgttattgccgcagattcgccaggtgtttgagctgagctacagccaggccgcgctgattgctgcgctgttgcagctgttctacatgggcgcttcgattgccagcggcatcgcggcggcctgggttagcccgcgcaacatggtgcggttgaccatggtcttgaccccccttttgctcgggctggccgtcgccacgccgtgggcgctgccatttgcactgtgcctggcgctggtgtcggcctgtgcggtatcgaactggaacgccattgccgcgttggcacgagacgtcatcccggccacccaccgcagccgggtgttggggctggcgtcttccggggccgcctttgcgatttgcttgaatgggttgctgatcgcgctgttgcagggtttgtcattgcgccagttctggtcgatctgcgccgggctgacactgctggtgacgctcctgaccctgtgggcgctggcccccaagactgaacaggcgccccgcgcctcccagccgcccgcgttcaatcaagtactcaaacagtggctgcgcctgtgcctggaacaaccggtggcattgcagattgtgctgctcagcggttttatcggcgccatcagtgggccgtttctgaatttcctgtcggcctttgtcagcgatcgcctgcaggccagcgcgacggtaaccggctcgatgtggacgctgatcggcatcggcggcgtcatcggcgggctgctgctgggcacgctggcggatcgctggggcgcgctgcgggtgatggcgttgagcatcggcgcgtttggtctggccatgctcggcctgctcgtccaccccaacctgctattgagctggtgcgccgccggcgtgttcgcgctgttctatttcccttcatggggcttgatggcggcttacctgagtgcgcgcctgaacccggtgcacagcctgcaagtagtgagcctgagcatggtcagttatggcctggccagcgccacggccaacgggttgtgcggctggctgctgcaagcgagcggcgagtttgccggggtgcacgcctggattgcctgctgggtgctggcctgtctgttattgctcaagcgcatggctcagcgaacgactgacgcggcgctgcccgtgcagataccctgagggccccagctgacgctgcaaaatatccaccaacgccgcaacctccggcacctggcatccggccgagcgccagaacatcaggcgggccggggcaatcggcggaaagccctggcgttcatccagcacttgccagccttcgggcaccaggcgccgcgccatcacccccaccgacaagccttgctcaatggcaatcgcaatgccccgcgggctctggctggtatacaccacctgccacgagcgcccggcctgggccagcgcctgcacggcattcgcgcgaaaggcgcagccttcggcgtacaccgccagcggtacggattggcgccccacacagctccagctcggcgccgcgacccacacgagaggctcctcgcacagaaattctcccgcctgcaaaccggcatgctcgacgcccaagaccagatccagttcgccacggttcaaacggcctacgagcgcagtggacatttcgcagcagatatccgggcggacctgggcgaactgcgcctgaaagtccttcagcatgccgcccaacagatactcggcgtagtcctcaggcatgcccaggtgaatgcacacctgatcattgggcaattgcgctgaactgaccgcctcatggtgcaatttgaggatctgccgggcgtagatcagaaaggtttcgccactggcggtcaggccgacggaacggctggtgcggtgaatcaacggtgtgccaacgatctcttccaggcgctgcaaactctggctgaccgtggactgggttttgtgcaagcgctcggccgccgccgaaaaaccctggcactcgataatcgccacaaacactttaagtaagccgccatccagttcgcctgacataactatcgcctctgccgatggattcgatcacaacgtgtaatttccactttaaagcgctttacgcaactatcgactcaacacaacaaccgacttcaggagccgtgtatgagtcttaaacttgccgatgccgaaaccggtgatatcagcgatatcattaataccgagttgtaccccatacatgattcgggccatgttcaacttcgcgcactgatcgaacatgcccgcgcggaattggccgaagacggttgctgcctgctgaagaactttctgcgccccgccgcgctggaacaggcgcgcctggaaggcctggcactgtcgggcaagacgtttttctcggtgcgcaaggtcaacgcctacttcaccgaagacgacgccagcctgccccaggatgacccgcgccgcacattcatggagcgcaccagcggctttgtgacccgcgacatgatcgcccctgacgcaatcatccaccgcctgtatgtatcgccgatgatgaaacgctttatcggcgcctgcctcgacgaaccggagattttcgaatacgccgaccccttcgccggtttggtcatcaacgtgatgcccgaaggcaccgagcagccctggcacttcgacaccaacgaattcatcgtcagcatgatgacccagaagcccgaggccggcggcctgttcgagtacgccccgatgatccgctcgcgcagccaggaaaacctcggcgccgtcggcaaggtggtgcgcggcgaggaccgctcgcgggtgcaggaactggagctgaaccctggggacctgcaaatcttcaaaggccgattctcggtgcaccgcgtcacccgtgtagagggcgccaccgaacgcaacacggcgatcttcgcctactcggaaaaacccggaatcattggccgtgcccaacggaccaagcagctttacgggcgcctgtccgaagcccacctgcaagccgaacgcaacctcgtgcgcagcgaccagttgctcgactgattcacgcctgtaaaaaaaccaaaaaccgtctttgccctgtgaggaacaccccatgagcctgtccggcccgaaccgcaaccccgctgactgcgaacccacttatgacgagatccagcaaatccagctggaccgcctgcaacgggtgcgcaacgaactgaaaaaacgcgattacgccgcttgcgtgctgttcgaccccacccacatgcgctacgccactggctcgcgcaatatgcaggtgtactcggcacgcaacccggcgcgttacgcctttatcccggtagaaggcccggtggtgatcttcgaattcggcggctgcctgcacctggccgaaaccctgaacaccgtggacgaagtccgcccggccaaggccatctcctattacttctgcgaaagcttcctcggtaacgtcaccgccgattgggccgccgaaatcgacgagttggtgcgcaaatgcggcggcggcaaacgcatcgccatcgaaagcgccacctccgccgcagcctttgagctgcaacggctcggctatcaggtgttcgacgcccaggagccgctggaacgcgcgcgctgcatcaaggtgcccaacgagctgaaaatgatccgcgccagcctgcgggccaccgaagccggggtgcgcctgatggaaagcaaactcacaccgggcatcaccgagaaccagctgtggtcgcacctgcaccagcatgtgatcgccaccgacggcgactatgtggaaacccgcctgctctcctccggcccgcgcaccaacccgtggtttcaggaatgcagcacgcgccctatcgaagccggtgatttggtggcgctcgacaccgacgtggtcggccgtttcggctactacgccgacttctcgcgcacctttttgtgtggtgaccaggccgccaccgccaagcagcaggaactctacaaactggcctacgagcaagtgcagaccaacgtggaaatgctcaaggccgggcgtagcttcaaggaatacgccgaaatggcctggaagattcccgagcattacaaaaacaaccgctacttcgcgctggtgcacggggttggcatgaccggtgaatacccttacgtggtgcaccgcgaagacatcgacgcgctgggctacgacggggttttcgaagcgggcatgaccatctgcgtggagagctacatcggccacgacgacggcggcgaaggggtgaagctcgaagaacagatctacatccacgaacacggcattgagttgctgtccgactacccgttcgatccgcgtctgctgccgcgctgaacccgtctagcaccacaggcggccccgggacggataggtaacatgcatttatagaaggttactgtgcagaatttgtcgtttgtccatcgttgcgcaaatgacaaaactgcgggcatctctaataaaaacaacatgagagctgccctatgtcctatcccattgcccgcctcctgacttcgttttgccttgttcttctgccggtttcacagcggtctcggcggcgcgcgcatcgcgcttgccactgacccttgcggttcaacaaaaacgcatattcgcaagtaccggagaggcttatgaaagacttgacgaccctggacggcagcctgccgcatccagccgtaaacgacctgtgtgcccaagtgcaaagcggcgcgatcaaccgccgccaatttctgcgtaccgccgccctgctgggcattaccgtggccagtgcctcgacctttatcggctcggccctgctcggcaacgacgctcaggccgccgacgccacacccgcccgcccggggggcaggctgcgctttgcctgcgcgatccaggaaatccaggacccgatgctgatcacctggatcgaagcgtcgaacctgctgcgcaactccctggaatacctgacctgggtcgatgccgataacatcactcacccatacctggccgaaagctggagcccctccgaggacctcaccacctggaccttcaacctgcgccaggacgtaaagtggagtaacggcgacagcttcaacgtcgacgatgtgcagcacaacatcgagcgctggatcgccgccgactccaagtcggtcaaccgcaccgcgttccaggacatcaaggccttcgaaaaagtcagcgactaccagttccgcttgcaactgaagcggccgatcctggccatcccggaaatgctcaacgccttcacctgtgccctcgtgcaccgcagcttcaaggcgggtgatgactgggcgaaaaacccgctggccaccgggccgttcaagctggtgtcgttcgcggtgaacaagcaagcaacgttcgccaagcgcgccgattactggggcaagcccgccaacctcgacgagctgcgctacatcgatatgggcaccgacgtgtccacccacctcgccgccctgcaagccgggcaagtcgacgtgctgtaccgcgttaccgtggccgagctggacctggccaagcgtctgcccggtgcgcaattgctgagctgcaaatccgcgcagaccgtggtgatgcgcatggcctgcgaccagaaacccttcaccgacctgcgcatccgcaaggccgtggtgctgtgcgccgataacgcgcagatgctcaaggtcgcctatcgcggcatgggtactctcggcgaagaccatcacgtggcgccctctcatcccgaatatttccctttgcccaagcgcgaacgcgatgtggcggcggcgaaaaaactgctggccgaggcgggcttccccaacggtctggacatcgacctgatcgtcggcaacacccagggccgctatgaacaggactgcgcgcagatcctgcaacagaactgcctggaagccggtatccgcatcaacctcaaggtggtgcccgccgcgcagtactggccgatctgggacaaggccgcgttcagcctgacctattgggcccatcgcccgctcggtgtgatgtcgctggaactggcttatcgcggtggcggcgcctggaatgaaagccactacagcgacccggccttcgatgctgcactggacaaggccatgggcatcatcgatcccaagcagcgtgcggtcgccatgcaaagcgtcgagcagatcctgcaagacgcctgcgtgatcgtgcagccgttctggggcgacaaattcaccgccgtgagcaaaaaggtgcagggctttcaggtgcacccttccgacttctaccccatgggtaatgtctggctgagtgcctgagtcacgcctgcccgcctgcgggcaggcctcccaaaacctgtcggagcatggtcctgatggctcattttctactgcgcaaattgctgatgctgctggcgaccctgctgtcggtatcgctgattgtgttcctggccctggaactcaatatcgaggacgtcgcaatcaacgtcctcggcccctactccgccgctgaccagcgtgccgcctggctgctggaacatggctacaaccagccgttcgtgtggcgctacctggtgtggctcaaggacttcgtcaccggcgactggggcacctcggtgtactttcgcgaaccagtgctcaaactgctgctgcccaacctgtggcaaaccttgaccctggccgggctggccctgctggtgatggtgcccgtggcattgaccctgggcattctggccggtgtgcgccaaggctcgctgatcgaccggctggtgtcgttcctgtcgatcgtcaccacctcgattccggacttcgccagcgccgtgttcgtctcggcgatctttgtgttctggctcaactggctgcccggtgtgagcagcatgagcgatgggttcagcgccgtgcaactggtgctgccgctgatggtgctgtgcctgttcggtatcggttatctggcgcgcatcacgcgggcgtcgatggtcgaggtcatgcaagcgccgtatatccgtaccgcacgcctcaagggggcgtccaccacccgcatcgtattgcgccatgctctgcgcaacgtactgatcgcgccggtcacggtgatcatgttgtacatcccgtggctgctgtcgaatgtgatcgtggtggaggtgtttttcgcctacaagggcttcggctcgatgctctacaccgcgtcgctgaaccatgacgtctacctgatcgaagcctgcgcgatgatcagcggcgtggtggtgggcatcagcaagattttctcggacctggcctacacctggctcaacccgcgcatcaccctgcgcagtctcggcggaggtagccaatgaacctgctcaaatccttcaaacaccccttggcattgctcggtttgctgttggtaggcggttgggtcgcggtggcgctgtttgcgccgtggctggcgccccatagcccgctggaaagcttcacgcccttgctcacgcccatgacggccggggatgacggcgcaagcttcctgctcggcacggacatgattggccgcgacattctctcgcgcttgatctggggcacgcgcaccgtgttgttctggtcgatcctcgccacgcttaccgcgtttgccgtgggcatcgtcatgggcttgtgcgccggctacttcaacggctgggtcgatgcggtgctgtcgtatgtggccgataccgtgctgtccttcccggtgctggtgctgtacatcgtgatcatcatcgccctcggcgcctcggcgctgaatatcctgattgccgtgaccttcaccagcgccccggcgatctttcgcatcatgcgtgcgctgaccatcgacattcgctcacgcgactacgtgctcagcgccatcacccagggtgaaggctcactgcgcatcatgctggtggaaatcctgcccaactgcggcggcccgttgatcgtcgatttctgcctgcgcatcggctacaccgcgatcatgatcggcgccctgggctttctcggcctcggcctgccaccccccaccccggactggggcggcatgatcaacgacggccgcgccatggccatttccttcccgcacctggtgatcttcccgtgcatcgccatctccaccctgatgctcggcctgagcttgctcgccgacgggctggatgaacacgcgcagcaaggcgcaaggagttgagcatgactagccagcaaaccgttttgcgggtcgacaacctcagcgtcgaactgcccaagggcgccgaccgcagtcacgccgtgcacggcatcagcctggacgtgcgcaagggtgaaatcctgtgtgtgatcggcgagtcgggctcgggcaaatccgtgctgtcggcggcgatcatgggcgactatgccaagggcttgcggcatgccggtggcgtgatcgattttctcggtgacgacatctgcacgctggacgaatcgcgcttgcgcgccctgcgtggcaaccgcattgcgatgattttccaggagccgatggcagcgctgaacccggcgattcgcattggcaagcaagtcgaggagatcttcgatatccacgcgccgcaaatgcccgcggctgaacgccgtgagcgcatgctcgcgctgctggaatcgacccaactgcccgacccgccgcgcatcgccaacagcttcccgcaccagctttccggtggccaatgccagcgggtggtgattgccatggcactggcgatgaacccggatttattgatcgccgacgagccaaccaccgcactggatgtcaccacgcaggcccaggtcttgaagctggtgcgtgacctgcgcgggcgcggccagcacggcattttgtttatcacccacgacttcggtgtcgtggcgcagattgccgaccgtattgccgtgatggaaggcggccggctggtggaaatcggcgaacgagaccaggtgctcaatgcgccggcccacgcttacacgcgcaagctgatcgcagccgtgcctgccctgcatccggaactgcacgtgcccagtgcagacggcgaaatggccttgcgcatcgagcacctgaccaagacctacaccgtcggcggcagctcggtggcggcgctgcgtgatgtgtcgctgaacctgccacggggcaagacgctggcgattgtcggcgagtccggctcgggcaaaagcacgctggtcaaagccgccatccggttggtggacagcgacagcgggcatgtgtgggtgggtgatacggacttcctcgccctgagcggttccgccttggcggccaatcgccgacgcatccagatgattttccaggacccttacggctcgttgaacccgcgccatcgggtcggcgacatcatcgcccgcgccgcgcaattgcgcgggttgtcggccaaggacgcgtgggccgaggccggtgatttgctcgagcaggtcggcctcaagcgcgacgccttgcagcgcaagccccggcagttctccgggggccagcgtcagcgcatcggcatcgcccgcgcgctggccatgcgcccggaagtgctgatcgccgatgaaagcgtgtcggcgctggacgtgtcggtgcaaaaacaggtgctggaattgctcgccgaccttcagaagaaactcaacctgagcatcctgtttatcacccacgacctgcgcgtggcggcgcagatcagcgaccacatcgcggtgatgcgccaaggcgaggtcgtcgagtacggcaccgccgagcaagtgctgctcaggccacaaaacagctacacccaggcgctgctggcggccgcgccaggggcttcgcaactaccggctgccgggccgccactgaggctgatccgccccgctgctcactgaatcaaaccctttccccgcgtcgcagcgttcgctgcggcaacgggctgctgttgccgaaaaataactaataacgagagtaaaaccatgcgaccaaccctacgttacatcgctctggtccccgtgctcggcgccctcgcggcaccggccatggcctaccaggtcaccgacaacctcgacctcggcggcgccgtgcgggcgcgctgggattacgacccggaccgcgacatccagaagttcggcctcgacaccgccttcctcagtgccaagtacaactccgacacctggaccggcgaggcgcagtaccgtttttacgggcgctcctacccgtaccagtacaccaagaattacggtgacatccagttcgccaagttcgcgtgggtcggctacaagttcaacccggaccagcagattcaggtgggcctgaacaccgtgccgttcggcctgcagccgtacttcggcagcaccttctacgaaaccctgggcaacgtgatcggcctggaagacgtgcagcagatcgggaccaaatacatccagcaaagcggcgactggaacatccaggccggttactacctgcgccccgcgtggcagggccgtggcaccagcaagggcgtgacctattccagcgtgatctccgaggccgacagctacgtggccgacggcagcaataaccaggaacgcaacaccgtggtggtgcgcgtggccaaggccatgcaattgggcgactggaaatccgaagtcggcctctcaggcctgacctcgaccctggaaaacaaggacaccggcaacgacggccgccgcaatgccgtggccatccactacctgggcaaaaacggcccgtggggcgtgcagttgcaggcggcgcgccagcagatgtcgccgcgcaacgaaggcaccgatggcgtggtcacgctgggcggctatgacggcaccttcaacgtcgccagccggggcaacctgtacgtggcggatttgagctacgacgtgggcggcaaatacctgttcgaccagatcagcggcgtgaagctgtatgccaactacagcgcgttcgacaagtccgacgatgcgttcaagacttcgcagcgggtgattttgggtacgtcgttttcattcagcaaattgtggatcgccacggaatggttgatcggcaagaacgatccgtacatcggcggcagcagctatacccagagtttgggggctgggggtagcaatcagtgggagaatcagctgtacatgaacatcgggtattacttctaataggcggcattgctgagatcgctatcgccggcaagccggctcctacagttgaaatgcggttccctgtaggagacggcttgccggcgatggcgttcgcacaaacacaataaaaacactgtgtggaacccgaaccatgcgccacctgccctccctcaacatgctccgcgtcttcgaagaagtcgcccgccaccgcagcttcagccaggcggccgtgggcctcaatgtcacccagggcgcggtcagccgccagatcaagcaactggaagactaccttggcgtcgccctcttcatccgcacgccccagggcctgtccctgaccgaagccggctttgccctttccccgcacctgagcgacgccttcgaccatatcgagcgcgccctgcaagccgtgcgtgtgcccaacctgcgccagcgcctgcgtatcgtggcgccgccgacctgggccacgcgctggttgtcggcgcacttgcgcaggttttgcgagcgctacccggacatcaacctcagcgtcacccaccagaacagccacgcgagcctggctgaaatcgactgccagatccgtttcggcctggaggcgaacgcccattgcagcagtaaactgttggtcatggagcgccacatcgccgtggccagcccggagctgtttaccgatggccaaccgccggacctgcgccgctcaccgttgctgcatatcctgcacgacggcaagcgcttgaaggtctgggaaaactggctggcggccatgggccgggaggatatcgatgcggaccagggcctggaattcagcaccctggaccaggtgattcacaccgccctggcaggcggcggtttggcggtgatcgaccggcagatgatcgagcgtgaactggccaatggcagcctggtgccgatcacccccgtggaagtgatcggcccgtatggctattggctggacgtggcgacggacaaacagggtttatccaaggttcgcctgtttacgcagtggctgggccaggtcagcaatccctgacaccggcggcgcttcggccttgcacgcctggctcaaggtcaacgccttggtctccggtgcccaggcccaggaaatcattgcgccgaacaccagaatggccgcgagaatgcccatggtcgggctcaagccaatgcccgccacgctcaccggcaacaggaacgtgctgaccgccgagcccagccggctcaccgccgtggccaggccgatgccgctggcgcgcacttcggtgggaaagctttctgccgggaacacgcccaccaggttgctcaccgccgacaacaccagcgtaaacacaccaaacgtcatgaccatcaaccacgccaggctgcccggcaataccgccagcaggaacaatgccgctgcgaggatgatgaacgagttgatcaaaaagccccggcgcgagaacttcaccgtgcaccagataccgatcagcgcgccgacaatcagcagcatattcagcagcagctcggtgccaaagccctgggacaagcccatcttctgcaggatcgacggcaggaaggtgtagatggcgaaatacggcatcacaatgcacacgaagaacaagcagttgaacgcggtgcgcttgcggtattcacggctgaacagcacgccgtagcccaaacgggtttgcgtggtgggttcttcatccagcaccacatgctcgcccaggtgcttcttgacgatggcacgggcttcggcgatgcgcccccggttgaccagccatcgcggcgattccggggtgccgatgcgcgcgagcaggatcaacccggccggaatggccgaagacgccaacatccagcgccaggcgtcatcaccgaggctgagcatggcggtgccgacaaaggtcgcggccacgtagccgaaggtccagatcacactgaatgaaccgagcagcacgccacggtgtttcttcggcgaaaactcggccagcatcgcgtggccgacactgaagtcaccgcccaggccaatgccaatcaggatgcggcacagcagcaggcccatggcggtttcggcgtaaaactgcatcaccgaggccacggtgatcagcacaaagctgaccaggaagattttctgccggccgagggtgtcggagatccagccgaaaaacaggctgcccagaaacaggccgatcaaggccgaagcgccgatcaagccttgccagaatgcatcgagctgcatctgggggctgagcagggtgaaagcgatgccgatcaggccaaggatatagccgtcggtgaaatgcgcgccgaaggtgaggccggcaattttcaggtggaaacggccgatgggcaggtcgtcgatattgacgggttgagcggtcatgggtgttctccatattgtttttcttgacggagtaacagcgggcttgcgccttgtggtgctctttgtgggagctggcttgcctgcgatagcggtgggtcaggtaacacaaggcagctggcagatcgctatcgcaggcaagccagctcccacaggggtcgagggtgttttaaaggccgcccatcaacaggtatttgatctccaggtaatcctccagcccgtatttggaaccctctcggcccaggcccgattccttgatgccgccaaacggcgcgacttcagtggagatgatcccttcattgatacccaccatgccggcttccaggccttcagccatgcgccacacacggccgatgtcacggctgtagaagtaggccgacaacccaaacggcgtatcattggcgcgtgccagcacctcggcttcatccttgaagcggaagcacgcggccaccgggccgaaggtttcttcttgagcgatcagcatgtcgccgctggcttcggtgaggatggtcggctcgaagaacgtaccgcccagcgcatgacgacggccgccgcacagcagcttggcgcccttctccagtgcatcgtcaacgtgagcctcgactttggacagtgccgctgcattgatcagcgggccttgctctgtttcgccttccagcgcactgccgacccgcatggcgctgacggcttcggccagtttgcgggtaaaggcgtcgtacacaccgtcctggataaagaaacggttgacgcacacacaggtttgcccggtgttgcggaacttggaggccatggcgcctttgacggcggcgtccaggtcagcgtcgtcgaacacaatgaacggcgcgttgccgcccagttccagcgagacttttttcagcgtgtccgccgcctggcgcatcagcagtttgccggtgcgcgtggagccggtgaacgacagcttgcgcaccacgctggaggcttgcagcgcgccgccgatggccacggcatcgccggagacgatgttgaacacgccggccggaatgcccgcctgctcggccagcaccgccagggcgaaggccgacaatggggtttcttccgacggtttgaggatcatggtgcaacccgccgccagcgccgggccgaccttgcgggtgaccatcgccagcgggaagttccacggcgtgatcgccgcaacgacgccgatggcttccttgaccacgatgatgcgcgcatcggccttgtggctcgggatcacgtcgccataggcacgcttggcttcctcgccaaaccactccagaaagctcgcggcgtagaccacttcacccatggcttcggccaacggtttgccctgttccaggctgagcaggtgcgccaggtctttctggttgctgagcatcagctcgctccagcgcttgaggcgctggctgcgctccttggcggtgagcttgcgccaggccggcaaggcgcggttggcggcgtcgatggccaagttggtttcttcggcggcggcgcgctgaacgtcaacgatcagcgcaccattggccgggttggccactggataagtcggcccaccgctggaccattggccatcgatgtagttgccagtacggattagcgggttcatgccacggcctcgatcaggttgaaacggtccaggcccggacgggcctcacgcaggatgcgcttgccggcggtgtaatcgttgatcacgtcgcacggggtgtagttgcgttccagctcgtggagttcttcggcatccagttgggtgtccagtgcggccagtgcgctgtcgaactgcgcggtggtgtcggcgcccaccagcatcacatcgacgcccgggtggttggcgacccaggcctgggcgatttgtgcgttggagacgccacgggcgcgggccacgcgttgtaccgagtgagcgatgtcgaacgacgcctggtcgctgtacatctgctgggtaaagaagtcggtctggttgcgcgttgactgcacctcgccggtgagcaaaccacgggccagcgggctgaacaccgagacgcccaggccctggtcgcggcagaacgggatcatctcgcgctcttcttcgcggtaggcgcagttcagttgcagctgcatgttgatcggcttgacccaaccgttgcgctcgcaggccatgaggatcttggcgagctggccggtgagcatggtcgacacgccgatgtagcgggccttgccggaacgcacgatgtcattcagcgcgcccatggtttcctcgaccggagtgttcacgtcgaagtaatgcagcatgaacacatcgacgtaatccatgccgagacggctgagggaagcgtcgatgctgtccatgatgtgcttgcgcgaatggccgctggcgttgatgccgctgcgggtgccgtagccgactttggtggtgaccacgatgtcgtcgcggcgcgccacgcgcttgaggatgcgccccaccacttcttcgccgacgccggcggaatagaagtccgccaggtcgatgaagttgacaccgttggccagcgcgtgggcgacgatcggctcactttgcttttcgtcgaagatccacggcttccagtccggggtgcccatgttcatggtgcccaggcacaggcgcgagacttgcaggccggagttgcccagtcgagtgtattgcatgggattctcctcaggcctttggcgtgtagaaagggttgctgatgtggttgaccacgtccgccagttgcgcggtgtacggcgtgccggtcagggcggcgcggatcgcggtgcggcaggcgttgtagttgttcaggtagacggcatcgaggtcatcgcagcctgggttgacccagttggcggtgacgatggcccactcgtcctcggcttccggcggcaaggtgccgtcgagcaaggcttccagcacagccttggcgataccggcctgggacgcgccccaggtggcattgccgtgcaggtcgctgctgatttcggccttgttcacatagagggtcatgggtttgaccgggatgttcggctgggcgatcaccatgaacgggcagtggccctggcttggcgacgccaggctattggcaaacgcctggccggccgggccgttgcgtgggccgatgaggatgttgatgtgggcagcattgacgcctgggccttcgaagccttcgccgatgtacagatcaagtgctttcatttcgcaaacgctcgttgttgttatggggagcttgtctgcgaattttttagcactgggctacggggtggccgtaaccattaaaagtcatggggctgtgagtttttctcatgccccctgcgacgatcagggctgtcttgttcgttgaccaaccttgttacaccccatatagtgtgcccacaaacagaacagaccactacatagtgtgcagcatcggtatttaccgaccacactcagcgcactttttcaatgcctaagtagcctgcaaaacacctatttttcgagtaccaggaaggagaatttcaatgctgagttgggatgaagtcgacaacgaagacaccggtgcagcggtgatcaagggcgccaacgccggccacgccaccgaagccaacatggaccgcctcgacggtgccggcgccgccgccgccatcgaagcccgcgccgtcaccgccagtgactccgccgccatcaagcgcgccaaagccgccctcgacagcctcgacgtcgccgaaggcctcgccgaactcgaaggcgcctccgcccgcgtcgccgttgacgaaaagcgcatgatcaactgccgcgccgacctcaaccaactcgtacccttcaagtacgactgggcctggcagaagtacctcgacggctgcgccaaccactggatgccgcaagaggtcaacatgaccgccgacatcgccctgtggaaaaacccagaaggcctgaccgacgacgaacgtcgcatcgtcatgcgcaacctcggcttcttctccaccgccgactccttggtcgccaacaacctggtgctggccgtctaccgcctgatcaccaacccggagtgccgccagtacattctgcgccaggccttcgaagaggcgatccacacccacgcctaccagtactgcatcgaatcgttggccatggatgaaggcgagatcttcaacatgtaccacgagattccatcggtcgcgaaaaaggccgcttggggtttgaaatacacccgctcgatctccgatccgaagttcgaaaccggcaccgtcgagaccgacaaagaactgctgcgcaacctggtcgcctactactgcgtcctggaaggcatcttcttctactgcggcttcacccagattctgtccatgggccgtcgcaacaaaatgaccggcgtggcggagcagtttcagtacatcctgcgggatgagtcgatgcacctgaactttggtatcgatgtgatcaaccagatcaagatcgaaaacccgcatttgtgggatgccgagatgaaggaagaagcgacccagatgattttgcaggggacgcagctggagattgagtatgcgcgggataccatgcctcgcggcgtgctgggcatgaatgcggcgatgatggaagactatttgaagttcatcgctaaccgtcgtctgtcgcagattggtcttaaagaagaatacccagggaccaccaacccgttcccgtggatgagcgagatcatggacttgaagaaagagaaaaacttcttcgagacccgcgtgattgaataccaaaccggcggtgcgctgagctgggactgattcaaatcaaatgtgagacttatgtgggagctggcttgcctgcgatgctgacacctcggtatgccagccatgcagaggtgatgccatcgcaggcaagccagctcccacattaatccggttcgcacatccgatacggttgattcctcaattccgcaaaaattgactcatgcccaatcaaaccatcaaaaccccctgcgtcggcctgtgctccaccgtctacggggacctcgtgtgccggggctgcaagcgctatcaccatgaggtgatccagtggaacggctacaacgccgaagagaaacaagccgtgtggctgcgtctcgaacaattgctggtgcaggtaatggccagcaagctggaagtgtttgacccgcagctgctgcgccagcaactggaaacccgcaagatccgctttgtgccgcatcagtcgccgtattgctgggcttatcagttgattgcccggggggctcgggtgatttccaaactggatgcgtatggcttggcattgttgccggagttccgcgagcgccatctggcggacttgcgcgatgcgattgaccgggagttttttctgttgtccgaggcgcattacgaacggtacatcgcacccggctttctgaatgaagcattcgggccggccctgatcgccacgctctgagccacaccacaaaaaaatgtgggagctgcttgcctgcgatgacggtgtgccagtcagcccattttccgactgttacaccgctatcgcaggcaagccagctcccacagttgatctccatcggtcaggagatccaggacggatctcgctccggttgcaggctgtaccgttcaatcgcctgctggcacacctcccgcgccacactcccctgctccaccaacgccgtcagcgccgccagcacaaggtgatggcgatccacctcgaagaaatcgcgcaacgccgcccgggtatcgctgcgcccgaacccgtccgtacccagtaccgtgtagcccgagtccagatacgcgccgatcatctgcggcaccgcccgcacatagtcggacacggcaacgacgggcgcgcctttgggcaaacaagccttcacatggctgacccgcgccgcgtcctgcgggtgcaggcggttccagcgttccacctctcgcgcatcccgtgccagttcactgaaactggtgacgctgaagacctcgctcgccacttgccaatcctcggccagcaactgcgccgctgcttgcgcctcgcgcaccagcgtgccggaaccgagcaggcgcaccttggcatcagccgcgccttccaggcgatacatgcccttgataatggcggcctcgacgccctcgggcaggcttggctgggggtagttttcgttcatcagggtcacgtagtagaactcgtcgacatcgtgttccagcatctggcgcatgccgtggtcgaggatcacggcaaattcaccggcgaatgccgggtcgtaggcacggcaattcggcaccgtggcggccgtgaggtggctgctaccgtcctgatgctgcaagccttcgccgcccaaagtggtacggcccgccgtggcaccgagcaggaacccccgggcgcgctggtcggcggcggcccaaatcaggtcgccgacccgctggaagccgaacatcgagtaatagatgtagaacggcaacatgcgcaggccgtgcaccgaataactggtggccgccgccacccaggaactgatggcgctggcctcgctgatgccctcctccagaatctgcccgtcggtggcttcgcggtagctgaggatcgagccgatgtcttccggctcataacgctggcctacgctggaatagatgccgatctgcttgaacaggttggccatgccgaaggtgcgcgcctcgtccgccacaatcggcacgatgcgtgggcccagcgccttgtccttgagcaggttggtcagcatgcgcacaaatgccatggtggtcgacatttccttgccttcggcggcggtggcgaaaccggcgtagcttgtgacaggcggcacgttcaccgctgcggcaatctggctgcggctcggcacataaccgcccagcgcgttacgccttttatgcaggtaacgcagctccaggctgtcgtcggcgggtttgaagaagctcagggattgggtctgctcatcgctcagcggtaactggaaacggttgcggaaggcgatcagcgcatcacgatccagcttcttctgctggtgggtggtcatcttgccctgcccggcctcacccatgccgaaacccttcttggtctgagccagaatcaccgtaggtttgcccttgacccgccgcgcagcgtggtaagccgcgtgaatcttgaccatgtcgtggccaccgcgcttgaggcggtcgatctgctcgtcgctcatgccttcgactaatttggccagggacgggttttgaccgaaaaagtgttcgcggttgtaggcaccgtccttggcggcaaaggtctggaattgcccatccacggtgttcgacaaggtctccaccagcgaaccgtcggtgtctttggccagcaacgcatcccagtctgagccccacaccagcttgatcacgttccagccggccccggcgaacaacgcttccagttcgtcgatgatccgcccgttgccacgcaccggcccgtcgaggcgctgcaggttgcagttgaccacccaggtcaggttatccaggccttcgcgagcggccagggtcagggccgacatgctttccggctcgtccatttcaccgtcaccgaacacgccccagacatggcgatcggtggtgtccagcaggttgcggtgttgcaggtagcgcatgaagcgcgcctggaaaatcgagctgatcgggcctatgcccatggagccggtgggaaactgccagaagtccggcatcagccacgggtgcgggtagctggagagcccacgcgcgccagccagagacccgccgatttcctggcgatagtgggaaaggtcctgttcgctcaggcgcccttcgaggaatgcccgcgcatagatgcccggtgcggaatgcggctgataaaacaccaagtcgccgccgaaccggtcgttgcgcgcgcggaaaaaatggttgaaaccgacttcaaacaaatccgccgcgctggcgtagctggcgatatgcccgccaagctcgccgtaggcctgattggcgcgcaccaccatggccaaggcattccagcgtacgagtgaagccaggcgctcttcggtggcgaggtcaccgggaaacgccggttgctgttcgacgttgatgctattgatgtacggcgtaccgtgacggggtttccagtcgatgtgcggcgcactggcttctcgggccagcaagtcaaggatttgccgcgccctggccggcccggcgttggccaccagcgaggccagggcgtcacgccactcgtccagctcttgctgatccattgctgtttgattcactgcactcgcgaaaccgttcatgggcacctccgggctttttttccagtttatggcggtgccaaaggattttttgcctgatatcaggcgcagttttcatgaatttgagcatgaaacactgcaaaacctcttctcaccagcacgttgtgcttcagcgcccacaaagcgcgcaactgtgtttaaaatgccgcccgctcaatgactgacgtttaacgatgaacccagacgcactcgccaccctgcacgcccacctgctcaccgccctggccagcccgccggccgagacccgccgcctgttccatggccgcggccgctgctggccgggcctggagcaactgacggtggactggttgcagggcgtgatcctggtttcgctgttcaaggagcccgagcctgcgcagctcgacgccctgaaacacctgttgcaaaccgggttcagcgcctacaccgtcgccctgcaacatcgctacctgccacaaagcaccaccgaatggctttgcggcgcagccgtggaagagctgaccatcaccgaaggcggcctgcgttacctgatcgacctgggtaaaaaacagaatagcgggctgttcctcgacatgcgctacggccgcaactgggtgcgtgaacaggccaaggggcagcgagtgcttaacctgttcgcctatacgtgcgggttctcggtggcggcgattgaaggcggcgccgaccacgtggtgaacctcgacatggcccgtggcgccctgagccggggccgcgacaaccatcgcctgaacggtcacgacctgagcaaggtcagctttctgggccatgacctgttcaagtcctgggccaaggtcacccacagcggcccttacgatctggtgatcatcgacccgccctccttccagaaaggcagtttcctgctgaccaaggactaccagcgcgtactgcgccgcctgccggatttgctcacggcgcaaggcacggtgctggcgtgcatgaacgacccggccttcggcgaagacttcctgatcgacggcgtaacccgcgaagcaccgggcctgcgctttgtggaacggttggaaaacccgccggagtttccggatatcgacccgcaaagtggtttgaaggcgctggtgttccgtcagggctgatgccgaaacgcctgacgcttgctacgctaagtgatacaccggggcggtgaaccttatgacccccttcccggtcgatacctgcattccccggccagactcgacggcgtcacgttgtcggctgccccgtttcaccttttggagaaccgcccgtgatatcgaccctgcatgtagccagactcaaagcctggggcgcccacggctttaccgccaccggtgtggtgttggcctttctggccacgctggcgctgctggaaaactcgcccaaggcctgcctgctgtggctgggcctggcactggtggtcgatggcgtcgacggttccctggcgcgacgggtcaatgtcagcacggtattgcccagcttcgacggctcggtgctggacctggtgatcgattacctgacctacgtgttcattccggcgctgtttatctaccgctatatcgacctgccggacttcacccatctgttcaccgtgtcggtgatcctggtgtcgtcgttgttctgcttctgcaatgtgaacatgaagagcaaggacaactacttcgtcggcttcccggcagcctggaacgtggtggcgctgtgcgtgtacatcattcagccagaggcctgggtgacgttggcaaccgtgatcgggttggcgctgctgaccgtgacgccgatgaagtttttgcacccgttccgggtcaagcgcttcatgccgatcaatatcgcggtcaccacgatctggttgctgtgcagctttttgatggtggtggattacccgaataccaacccgtggacgtttgggttgtggtcgctgatgtcggcgtatttcctggggatttgcgtgtggcgtacggcgttggagtgggtcgaaacacacaagtcctgagcgggcacagttaaaaatgtgggagctggcttgcctgcgatgcagacagctcggtatgtcagctgtaccgcagtgatgctatcgcaggcaagccagctcccacattggaactgcgtacagcaggcgagtaagatggcggcctttggcgcagccccttcgctgcgccctgccaataataagccctgcccatgcccttcgaactcagcgttgacctcaccaccctggccatcctggccgtcgttgcctttatcgccggcttcatcgacgccatcgctggcggcggcgggctgctcaccaccccggccctgctcaccgccggcatgccaccgcatctggtgctgggcaccaacaaactgagttccaccttcggctcggccaccgccagtttcaccttctaccggcgcaagctgttccacccgcgccaatgggtgcatgcgattgtcggcaccttggtcggtgcgttgaccggtgcagtcgtcgcccactacctgcccgccgaaaccctgaacaaaatgctcccggtgatcgtctttgcctgtggcgtttacctgctgttcggcggcacgcccaaggcgccgctggacgccgacgcaccaatcaagaagaaatggcaatccacccagggcttcgccttgggcttctacgatggcgtggcgggccccggcacgggcgcgttctggaccgtcagcacgatgctgctgcaccccatcgacctggtcaaagccagcggcgtggcgcgcagcatgaacttcgtcagcaacgcggcggcgctgacggtgttcatcatcaatggctcggtagactggatcgtcggcctggccatgggcgtttcggtaatgtgtggcgcgttctttggcgcacgcagtgccatcagcggcggcgccaaattcattcgcccggtgtttatcaccgtggtcctcggcctgacggtgcgcctagcctggcagcactggttcagcgtggcctaaacggcgcgccaagtagaggtcgatcaggtaacgcgcaatcgaacgtgaggccggcaacggcggcaggtcgtggatgttgaaccactgcgcgtcctcgatctcgtcagcctggggcacgatgtcgccgccggcgtactcggcgtgaaaaccgagcatcatcgagtgcgggaatggccagcactggctgcccatgtactggatgttcttgacctccacctgcacctcttcgcgtacctcccgaatcaggcaatcttcggccgactcacccggctcggcaaacccggccagggtgctgtagacgccggtgacaaaacgcggcgagcgcgcgagaaggatttcatcgccacgggtcaccagcacgatcatgcttggcgaaatccgtgggtagctgcgcaggtcgcaggccgggcaatgcatcgcgcgctcgcgtggcacctggaccatggcctggccgcaactgccgcagaaccggtgttcccgcgcccaggtaccaatctgcgccgcgtaacccagcactttgtacagggtgtgatcaccttgcagcatgaaggcccgcaggccctgccagctgcaacctggcacttcaactgccgaattgagttccagcaggtacacaggctcgccatcaagatggccaatgccatgctcggcaaacaccgacaattcctggcgcttgagccattcccgagggaacagcgggccattggtgtcatgcaaaaagccgtcgcggctgcgggcgacggcccagccgccaggggtgtcgttgtccagcagcgttgtggtaatccagcctggggtcatgtcagtcaatccacgaattcgggtttctgcttgctcatatgggccgcgatggccacgcgcaggtcgttggattgcaacatagccgagttccaggtggcaacgtattccagaccatcattgaccgtgtggtcacgcatgtagctgatcatggccttggtgccagccacggcaatcggcgatttggcggcgatttcacgggcgatttccatcaccccggccagcaggctgtcctgatcggcatacacgcggttgaccagcccgatgctgcgcgcctcttcggcgccgaatgggcggccggtgtaggccagctcgcgcagcatgccgtcgccgataatgcgcggcaggcgttgcagggtgccgacgtcggcggccatgccgatgtcgatttccttgatcgagaactgcgcgccctcagcggcgtagcgcatgtcgcaggcactgatcaggtcgatggcgccgccgatgcaatagccttgaatcgccgccagcaccggcttgcggcagttgtccacggcattgaacgaggcttgcagttcgaggatcttgcggcgcagcaggcgcgcgttgcggcccacgtccttgccgaagtcattggctaccgaggccagcatcatcaggtcgatgccggaggagaaatgcttgccggcgccgctgagcaccacggcgcgcacggcatcggtgtcttcgacccattggaagatgtcgatgatttcggtccagaacgccgcgttcatcgcattgatcttttccgggcggttgatctgcacatgggcaacgttgccggtgagttcgacgacgaaagcttggtattcggacatggcagtgttccctgactggcgagtgataaggcccgaactataacaagggtgtgtgacggcgcatcggccaaaaacgggactggcaaaggtaatgaaatgttgtgggcgaaggcttcatgcagcgccgatacatttcacgccaaaggctcgacttatcggctatacaatcagggccattgcctggagccgcctatgccgtccacgtttcgctcatcattgattctggccctggtggtcgtgctgaccggcgtcggcgcaggcctgggcgggatgctgctggcgttgctgctgcatggcattcaacacctagcttacggctacagcctcgatagcctggtcagccatgaaaccttcttgctgggcgtgacggcggcggcgcccgaacggcgcgtgctggtgttggtggtgtgcgggctggtcgccgggctgggctggtggacgatttatcgctatggccgcccgctggtgagcatcaagcaggcggtgtcggaaaaaatgccgatcatgccgcccaagaccaccctcgcccatgccgtgctgcaaatcgtcaccgtggccctcggctcaccgctgggacgtgaagtggcgccacgggaagtcggcgcgctggccgctacgtggctgtcgcaacgggcacggctgacgccgccgatgcatcgcctgatcgtcgcctgcggcgccggtgccggcttggcggccgtgtacaacgtgcccttgggcggcgcggtgtttgtgctggaagtgttggtgggtgcattcagttggccggcggcggtgattgccctggccacttcagcgattggcgcatcggtggcgtggatcgggctcggggcggagtcgcaatatgtagtgccgcacctcgtattgagcccgacactgattgcttgggccgtagtgtgcgggcccgtgtttggcctggcggcatacggtttcacccgcctgaccggcacggcccgggcgaatgccgcgcgcggttggcgcctgccggtgctgtcgctgatcaacttcacgatcatcggcgggctggccatgctgctgccgcagatcctcggcaacggcaaaggcccggcgcaactcggcttcgacagtgaactgaccatcggcctggcggccttgctgttggtggtgaaggtgctgatcaccgccagcagcctgcgcgccggggccgaaggcggcctgctgacaccgggcctggcaaatggcgcactcctggcaattatccttggcggcgcctggagcctggtatggcccggcgtgccgctgggcgcctttgccattatcggcgcagccgccttccttgcgtccagcatgagcatgccgctgacggcaattgtgctggttgccgaattcacccgtatcgaccatgactttctggtgccgatcatcctcgcggtggtgggctcgatgtgcgtgagcaagtggtgccaaagccgggaaagtgctggaaaaaaaccggcctaagtaccatccttcgcgctttaagccgccccatcagcggcgctcgacgctcaaaggaaccgccatgcacgcccaacccctcgcccccgccgatttcgaattcatcgaagacaccctgctcaagtacggcgacgaccattcggtgctgaacctggccgagctcgacggctacttcaccgcactggtctccagtcccgcgcaagtggacgtcggcgagtggttcccggccattttcggcgggcagaacccgaactgggaatgtgtcgacgacgcccagcgcttcctggcactgtgcgtgcgccacatgaacaccctggccgcacaactggccaccgacgcacaaggcttcgaagcacgcttcgatgacaccgagcatcagggccagatcgtcacactggccgaagaatggtgtttcggctacatccgtggcgccgccatcggccattggccagagatgcccgccgaacaagccgcccaactggagaaaatctcctggtgcgccgaacaggacaacttcgaactgcccgcagacctggacgtaaccgcccatcaacagcgcgtcggcgaaatcgaaccggcagcgcgagcgctgcatgattactggctggcaaaacgataatctggcttctgctctggctctggcttttgatcttgatctcaggcgccccgtcaaaacacgctggccggaattcgacagggatttggggggcaaaccggcaggacgccggtttagccgcgacgcgccatggatggcgcgtggcggcggccccccaaatccctgtcggattacgggcacaccgagcgtgagcgaggtgccgagtgttggggcaagagcccttttggttacttttggggctcttttccaaaagtgacccgccgtaagggcggaaccaatatcagccatcaccaaaaaaacggatatgtacaccgacagaccgtcaccgcaggcaagccagctcccacaattaggccggtgtacacccaataacccacgcattaccaccccacgctcgacaagcaccgccgctttgcccgattattcgggtccgcccgccgatcgtgccttgaatcaggagccctgtaccttgagttcgcagaaaaccgtgaccgttacaccgcccaacttccccctcaaaggcaaggtcgcgccccccggctccaaatccattaccaaccgcgccctgttgctggccgccctggccaagggcaccagccgcttgagcggcgcgctgaaaagcgacgacacccgccacatgtcggtagccctgcgccagatgggcgtgaccatcgacgagccggacgacaccaccttcgtcgtcaccggttccggcaagctgcaattgcccgcgcagccgctgttcctcggcaacgccggcaccgccatgcgctttctcactgcggccgtggccaccgtgcaaggcaccgtggtgctgaccggcgacgactacatgcaaaaacgcccgatcggcccgctgctggccaccctcggccagaacggcatccaggtcgacagcccgaccggctgcccgcccgtgaccgtgcatggcgtgggcaaggtgcaggccaagcgctttgagattgatggcggtttgtccagccaatacgtatcggccctgctgatgctcgcggcctgcggcgaggcgccgattgaagtggcgctgaccggcaaggacatcggcgcccgtggctacgtggacctgaccctggactgcatgcgcgctttcggtgcgcaggtcgacgccgttgacgacaccacctggcgcgtcgccgccaccggctacaccgcccatgactacctgatcgaacccgacgcctcggccgccacctacttgtgggccgctgaagtgctgaccgggggccgcattgacatcggcgtcgccgcgcaagacttcacccagccagacgccaaggcccaggccgtgatcgcgcagttcccgaacatgcaggccactgtagtgggctcgcagatgcaggacgccatcccgaccctggcggtgctcgcggccttcaacaacacgccggtacggttcaccgagctggccaacctgcgtgtgaaggaatgcgaccgcgtgcaggcattgcacgacggcctcaatgaaatccgcccgggccttgcgaccatcgaaggcgacgacttgctggtggcgagtgaccccgcgctggccggcacttcgtgcaacgcgctgatcgacacccacgccgaccaccgcatcgccatgtgctttgccctggccgggctgaaagtggcgggcatccgcattcaggacccggactgcgtggccaagacctaccctgagtactggaacgccctgggcagcctcggggttgcactgagctactgagccgccggcgccgcgatggggagggaaagcacatgacacttcgccaaccctgcccgcccggcgcttgcgtctgcgaccgcgaacagctgctggaagcgcctggtgcggatgtgcgcatcctcaacctgacgcgtcaggaagaaaagcgcctgctcgaccgcctcgaagacctcaagagcctgcaagacctggagcacatgcaacagcggatgtatgagcaattgggcatccgcgtgcatgtcgcgccgggccacaccgaagtcaaaagcatgcgcggcatccagatcactatcgatgagctgcccggcatgtgccgcaagacccggcaatccatcccggcggcgattcgccgcggcatggagaaacacccggaaatcgcctaccgcctgctggatgcccacgacctgtttggccaaggttgagtcaccccggcacggcctccttctgaaacattccccgccccaaggctttcgctgtgtgcagatgcgtctgcgcagtgttgctttccgattccagcagcaactcggacgtcaccacctgcgcgccgcaataatcaaagatcccgtagtcgatttgtgtgcgcatggccttggcgtaaccgtggcggtcaaacgcgctgtcatccgccgcgccgagcgccagcaggtgcacctgcaaatgccgcagctttttcaccaccggcctgtccgggccatagtcgatggcccagccgttgacgaatacacggtcgacccagcctttgagcagggccggcagcgaccaccaatagatcgggaaagccagcaccaacgcgtcggcgcggtcgatgcgtgcctgttcggcaagcacgtcggccggcggcgtggcgcgttcgcgatgcacacggtggtcggcggcgctgtagcgcgggtcgaaaccttcggcagcgaggtcggcaatttcaaaggtatggccggctgccgtgaggccggcggcgacctgtgcggccacgctgtgggtcagggatttcgggtcgtgatgggcaacgacgatcaaagcatgcatgacatggactccctttcagtttaggcttgggcttaagttacctttggtaagttacttttggtatataagcatgtcaagagatgaatctcctgccccgcgtcgccgtttgtcccgtgaagatcgtttgcgccagctactcgatgtggcctggcaactggtgcgcgaagaaggcactgaggcgctggctctgggccgcctggcggaactggccggtgtgaccaagccggtggtctacgaccacttcgtcacacgcgcgggcttgctggccgcactctacgaagatttcgacgggcgtcaggacgaggtgtttaccgaggccatcgccgccagtgctgcgaccctggacgaccgcgcctgggtgattgcttcgtcctacgtcgactgtgtgttgctgcagggccgggaaattccaggggtgatcgctgcgctgagcagttcgccggagctggaaaccctcaagcgtcgctatgaagcggtatttctcgacaaatgccgcgatgcgctgtcgccctttgcgccggataacaaggtctcccaggccggcctgcgcgccatgctgggcgccgccgaggccctgtcccacgcggcggccagcggcgagctcagccgtgatgaggcgcaacaggagttactggcgaccgtcctggcgatggtcaatcgcggcgcgcgtgtaaaagaattttcatcgcccaaggaataaaggcgcacgacgggtgtttacctgagtacaccttgtgactctcgcacaaggcactcaaaaccaagaaaaccccaggagctcgtcatgctgaaaaaactctccctcgccgctgccgtgatgcttgcctcgtccatggccttcgccgcccctgccagcgtggccgacagcgccaaaggcaaagtgctggtcgacagcaaagggatgaccctctacaccttcgccaaagacagcgccggcaagtcggcgtgcagcggccagtgcctggccaactggccggcgttcaccgcgaaagacggtgccaaggatgccgacggctacaccgtgatcaaccgcgacgatggcagcaaacaatgggcctacaaaggccaggcgctgtacacctgggtcaaggacagcaagccgggcgacatcaccggtgacggcgttggcggcaactggaacctggccaagccataacgcgcgagctgcacctctgcgttgagggagcttgctccctcaacgcaggtatcggcctttaactgctctggcgttcgctcacaaaccgctgcgccttgcgcgtcagctgatcaaggtgccggtcgcgctgcttttcggcatcgaccatcgcgcgtttaccgtgtttttgcagcaggtaggtgtgaatctgccgcacttccagcgagcggtagatcgccgccacgtccagcacgcccatcaagccgtcggtgccgtagtcacgggtgttcatcagcacctgggtgcctcgcgcggcgcgcacttgaaaacccatggcctcgaacgcgggcactttttctaccgcacacgccagctcggcgtggggatagcgcaccagcacctcctgcaccatcgcgcgcgcgacaccctggcgccggcgcccggcctgcacggccatgaaggcgatgccacaggcctgtggatcgtcttttaccggcaggtaaaggcaaaacccgatgagctgctcctcatccatcgccaccaccagttccacggcgatgcccttggcgccatccagcgcgtccaggtacaggtgcacttcaaagccgatggcgtattgataaatgttgtacagcaggttgctcggcgccagcgccacgctgctgatgtcggtgaggttgtccaccaccatttgcaggatctgcccattgatgggctcggggcacggcgtggtgtaacgggtaaggctgaacatgcacattcctggggtttcgcgtcaaggcagcggcgattgtacctgttgcgcgcagacctcgcgcagacagctgcgcaaccagcgatgggccaggtcggcatccaggcgtgggtgccagagcatggccacggtaaacgtgggtatcgatacgggcagtacgaagctgtatagcccttcacgttggtaggcggtgtagcgttcgggcacgctggcgatcaggtcagtgtcgcgcgccagggcgatggcggtggcaaacccggcgacgatggtgctgatgtcacgcgtgagccccagcgcctccagcgcttcatcgatctggccgcgatcaagcccgcgccttgaaacgtagacgtgctggccctgggcaaaccgctgcgcagtgaccgcgccccggctcagcgggtggccagcgcgtaccacgccgaccaaccggtcgcgaaacagcgcctgcatcactatctccgggctggcgtccgggtcgactacgccgatgacgaggtcaacgccgccctcgcgcagcagcgtgtaatccttgtcggtcttgttgacgaaacgcagacgtacgccgggtgcctcccgggcaatgcgcgccagcaacgccgggcccagattctcaacaaactcctcgctggcccgcagcgtgaaggtgcgcaccacctgccccatctccagcgcttgcgcgggccgcagcaccgtctgtgcctcctgcaccaggcggccgacctgctcgcgcaacgccagcgcacggggcgtgggcaccaggccacgaccggcgcgcaccagcaaggggtcgccggtggtttcacgcaggcgggccagcgcgcggctcatggccgacgggctcaagcgcaagcgttgagcggcgcgggcaacgctgccttcggtgagcagcacatccagagtgatcaacaggttcaaatcgggcattggtgctccttacaaggcgttatacgcaggtattacctgcaacccatgcgtcttccgccatgttagtcggcaccgtagatttgtgacagctacgttcatacaaggaatctcccatgaagacgtcttcacgcggcgcgctgttgagcctctcactgtccatgttgctggcctcactgggcaccagcatcgccaatgtgggcctgccggcgctggcgcaggtttttgaggcttcatttcatacggtgcaatgggtggtgctcgcctacttgctggcgattaccgccgtgatcgtcagtgcgggccgcctgggcgaccgctggggccgccagcggttgctgctcgccgggttgctgctgttcaccctggcctgcgcgctgtgcggcgccacaccttcgctgccatggctggtggcattcagagccctgcaaggtctgggcgcggcaatcatgatggcaatgacgctggggctggtcggcgacacggtgaccaaggaacgcaccggccgcgtgatgggtctgctcggcacgatgtccgcggtcggcaccgccatgggcccgagtgtcggcgggctgctactcagcctgtggggctggcgcgcattgtttctggcggggatgccgctgggcttgttggccgccgccctcgcctggcggtatttgccggctgatcatctggctggcatcgggccttcccgcgattcactctggcagcccttgaaagacccggcactgcgcgccgggctggcgatgagcgccttggtgtcggcggtgatcatgacgacatttgttgtcgggccgttttacctgtcccggggcctggggctggcccctgccgggatgggcctggccatggcggtcgggccctgtgtcgcggcactcaccggcataccggccgggcgcctgaccgaccgcctcggcagcccgcgcatgaccctcgccggcctgggcatcatggcggctggcgccctgctgctgtcgctggcctcgggtctactcgcctacctcgcctcgctggtcatcctcaccacgggttacagcctgttccaggccgccaacaacaccgcggtgatgagcgatgtgcaacccgcccggcgcggaacaatctccggtctgctcaacctctcgcgcaacctgggcctgattttcggggcctcggccctcggcgcggtgtttgcctgggcctgccccgatgtgacccacgcagcggcgcaaagcgtggccaatggccttcacgtgaccttcggcgcggcactggccctgatcatcgttgccgggaccttcgcctggggccgtcatggcgccgcgagctgcccgcaaaacacccgttgaggcaaaaaaacaaaaaaggcgttgcgccagaccgggttacatcgcgcatcatgggcactttcaagcacaagggtaacgtccatgcgcgtgctgtcattgatgatgggtcttacgacgctggccgccagtatggcgttctgcgccagcgcgatggcgaatgaagaaagtcagttggtacaacagatcaacgcctaccgcagccagcttcagcgctgcggtgaccagggttcccaggaactgccaccgctgaccagcgacacacggctggtgttgccggcgaccaacgtcggcgatttgcaacaggcattggcgcgggctgcgtatccgatggtcaacgtgcaggccatcagcctgtcggggcccaaggatgcccaggcggcgatgaaggcggtgcgtgaaagcttttgccgcgtggtgctcgacccgcaattcgtcgacattggggtcagcaacagtggccaggattggcgcatcgtgctggcccgcccactgctgaccagtggcctgggcgattggcagaccgaaggcaagcaattgctgacgctgatcaacgccgcccgtgaacagccgcgccaatgcggcacccaggcgtttaccgcgaccaccccgttgtcgtggaacgacgacctggccaatgccgccaacagtcacacgcgcaatatggccaacggtaacttcttcgaccacctcgaccacgacggccgcacccccggtgaccgcgccgaactggccgggtatatcgcgaagaccatcggcgaaaacatcgccgccggcctcgacacgccgcgcaaggtggtggacggctggctcgccagccccggccattgcgccaacctgatgaacccgcagtttcgtgaactgggcgcagcctatgcaatggaccccaaaagcgacgcgggcatttattggacaggggttctgggttcgcaatagcagcgcggctgccgagcggcccaggccacacgtgcaggtagcgtcagattgccagcatctggataatcgcactgaactggcagccgccctgccggtctgttgcctgacgcgccggcagatttacgtgccctcaagaccgctgtagagaaggtgttcaccccatgatgaattggctgcaaagcagcagcgacatggccgagcaggttcgcctgcatgattgggccagcacccctctggggccgctggaacattggcccgatgtgctcaagaccaccgtcgcactgtgctttgcttcgagtttcccccagtccatcatctgggggccgtcgatgaccctgctctacaacgacgcggccattcccatcctgggcgacaaaccctacgcgctgggccgcccgttcaacgaggtgtggcaggaagtctgggaggaagtgcgccccatcgcccaggccgctttcgaagggcatgccacctacgtggaaaactatccactggtgatcgagcgcggcaacggcccggaacagacctacttcaccttttgctacagccccatccgcgacccgcagggcacagtcgtgggcatgctcaacaccgtcaccgaaaccaccgccaccgtatttctggcgcggcgcctggcggtgctggatgcgatcggcaacggcgtggccaacgccaccgatgccgaagccatcatgaccatcaccacccgcctgctggccgaacacctgaacgtgtccaactgcgcctacgccgacatggacgccgatgaagacggcttcaccattcgcggcaactgggcggcaccgggttcgccgagcattgtggggcgctacagcctggcgtcctttggcgcacgggcagtccaacagttgaacgccggtgaagcgttggtgatccgtgacaaccgtgtcgagttcccccccgaggagtccgccagttaccaggcgctgggcgctaccgccacggtgtgtttcccgctgatcaaggatggccgcctgaccgccctgatggccgtgcatgacaaggcggcacgtgcctggtcgccctatgacctggcgctggtgggtgaagtcaccgagcgctcctgggcgcacatcgaacgcgtgcgcgccgacgccgccgtacgcgaaggcctggcagcgatcaccgaactcaatgccaccctggagcagcgcgttcaagagcgcaccgccgcgttgacccaggccgaagccgcgctgcatcagtcacaaaagctcgaggccatcggccaattgaccggcggcgtggcccacgacttcaacaatttcctgaccatcattcgctcgtcgatggattttttgcgccaaccgaacctggccgatgaacgccgccaacgctacctgagcgctgtgtgcgacacggtggagcgggccagcaagctcaccagccagttgctcgccttcgcccgccgccagccgctcaacccggaagtcttcgatgtgtgcctgcgggtacgcaatatcggcgaaatgctcgaaagcctgaccggcgcgcgcattcaggtgcagatcgagttacccgagcagccctgccatgtgcgtgtcgattccagccagttcgagaccgcgctgatcaatatcgcccttaatgcgcgcgatgccatggatggccaggggacgttgtgcctgcgcgtcagccatgtggccgcattgccacgcatccgtggggatgccgaaagccggcagccctgcgtggcgattgccctggccgacacgggcgtgggtattgctcaggaagcattcgaacgcattttcgagccgttctttaccaccaaggcggtgggcaaaggcaccggcctgggcctgtcgcaggtcttcggctttgccaagcagtccggcggtaacgtcgacgtggccagcaccctgggccagggcacggtattcaccctctacctgcccgccgttgaagcgccggcctcggcacctgcggccgtcgccgaggagcgttgcccgaatatcgatgcggccctgcgccatatcctgatcgtggaagacaacctggaggtcggccgtttcgccaaccagatcctgcaggacctgggctaccagaccacttgggccaccgatgccgaacaggcgctggccctggctggcccaaaggtggcgggttttgatgcgattttctcggatgtggtcatgcccgggatgaccggcgtcgccatggccaagctgctgcgccagcgccggcccgatctgccggtggtgctcacgtccggctacagcgaagaattggcggacaggggttatgaagggttcgagttcctcgccaagccctactctgccgaccaggtggcccgggtgttggccaagtcgatgcacaaggactgacgcctagtcagccacggcaacctggttacgccccatggccttggcgcggtacagcgccttgtcggcggtgttcatcaggctgtgcaggtcctgatccaggctgcgggtggaggccacgccgagactggcggtcaagccctgcaccggctcggaggccagcccggaaatcgccttgatcagttgttcggcaatgtcccgcgcggtctccagtgacgtattgggcagcaacaccgcgaactcttccccgccgagccggccgtacacatccgcctgacgaaacgatgcgctgatcaccccgccaatctgacgcaatacctgatcgcccgcctggtggccataggtgtcgttgatgtctttgaaatggtccatgtccatcatcaacgcgcacagcggttgccggttgtggcggcattgcgcgtacaacaggtgggcatgttcgaagaaggcgcggcggttcatcagcccggtcagctcatcggtctgcgcggcccgcgtggagatattgtgggcacgctccatttgccgggtcaggcgaaaggctttttccagggcatcagacaatttgcgcgtggcgctgaccacaaaggtcgagaacaccaacaccgccacggccacgcccacctgcatcggcgagggctggaacagcagccacagcgtgcacggcaacagcaccagggccatggagcccagggtcatataccgataagccgaataacacgagaccgcgctgaccgacatgcccacggtaaacagcatgaccagcacctgggagacgcggtcgtcgatgggcatcaccgccagcgcgccgatgccccacacacccgcagacagcatcagcgtaacccagtagcggcgctcccaacgctggggggtacgttcgtggttcgggcagcgaaaccagtccatgaacatcttgacgcgcaacagtgacgtcaccgccagcaccgtcagccagaccagcatgaccttgtggtcgaagcggtcccagcacagccaacagagcatgacagcgcccaggtaactgccaaaaatggcggcgaacgattggcgaaacagctggtgcaaacggtcagttcgcacctgctcttcgataaagccatcctggtcttgcccacgcccaaggccgttcatgaaatccgcctgcttcaactgccacgacaaaggcgccattgtggcaccctgccactagcccggacaacagaatccggcacagtagagcccttaaagcacttgcggccgcagaatcagcacgcccaacggcggcagattcagcgacaacgataccggctgcccgtggcgcggttcatccaccgtgaacacctcacccccgttgccataattggaaccggcataggtgtcggcatcactgttgatcacctcactccagcgcccggcaaagggcacgccgacggcatacgcctcacggggcaccggagtaaagttggccactaccagcaccggcttgccgtccttgctccagcgcaaccaagcgtagacgctgttgatcgcgtcgtcgccgatcagccactgaaaaccttgcggcgcatcatcctgctcatgcagcgcaggctcctcgcggtacaggcggttgaggtcgcccaccagcttctgcacaccccggtgctcggggtattgcaagaggtaccagtccagttgctgatcgtggttccattcgcgccactggccgaactcgcagcccatgaacagcagttttttgccggggtgcatccacatgaaggccaggtaagctcgcaagttggcaaacttctgccagcgatcgcccggcatcttgtcgatcagcgagtgcttgccatgcaccacttcgtcatgggaaatcggcagaatgaagcgctcggaccaggcatacaccaggccgaagctcagctcgttgtggtgatgggcgcggtacaccgggtcttgctggatgtaatgcagcgagtcgtgcatccagcccatgttccatttgtagttgaaacccaggccgccctgctgggtcggctggctgacacccggccaggccgtggactcttcagcaatcaccaacgcaccgggcgcctccagcgcgaccacgtcgttcaagtggcgcaggaagtcgatggcttcgaggttctcgcggccgccatggcggttaggcacccactcgccggccttgcgcgagtagtcgcggtacagcatcgaggccacggcgtcgacgcgcaggccatcaatatggaagtgcttgagccagtgcaacgccgacgccagcataaagccatgcacttcggtgcggcccaggttgtagatcagcgtgtcccagtcctggtgaaagccttccagcgggttggcgtactcgtacagtgccgtgccgtcgaattgcgccaggccgtgggtatcggtgggaaaatgcgccggcacccagtcgaggatcacgccgatgttggcctggtgcagggcattgatgaagaaagcaaaatcctgtggcgaaccaaaccgcgcggtcggcgcgaattgcgacaacgcctgataaccccaggaaccgccgaacgggtgttccatgatcggcatcagctcgatatgggtgaagcccagctgctgcacatacggaatcaaacgctcggccagttcgcgccagccatattggcgggcgacttcaccggcctcgtccagctcgcactgccaggagcccacatgcaactcataaatcgacagtggcgcgcaggctttttgccgctcggtgcgcgactgcatccattcatggtcctgccagtccacctgcaacggcgcggcgactttggacgcagtgtccggcggcagcgcagtggccagcgccatcgggtcggccttgagcggcagaatcccgtgggcgccgagaatttcatacttgtaggccgcgcccgcttgcaggcgcgggataaagatttcccacacgccagacggatgccgcagacgcatcggatggcggcggccatcccagatattgaaatcacccaccaccgacacacgccgggcgtttggcgcccatacggcaaaacgcacgccgtctacgccgtcaacctgggtgacttgcgcccccaggcaactgctgaggtcgcggtggttgccttcagcaaacaggtacaggtccatctcgcccagcaacaattgattgaagctgtaggggtcttcggtgatctgctcgccaccggcccactggattttcagcaggtaaggctggcgtgtcgaaaagtgcccgacgaacaaccccggcacttgcgtggcgtcgagactgccgatcggttcgccgctgtcgcgcgccagcacctggacactcagggcctccggcaggaatgcgcggataaactggccgccgtgttcatcatcgtgcggccccagaatcgagaatgggtcgtggtgttcggcgcgcaccaatgcttcaacatcgtgcggcgccggcattgcagtcaacttcgcttgcagcggttctttatgtgtaaaactcatgacgtctccccaccgcgtgcagtcttcgatataggtatgagcccgctgagcaggccgtgcaaaccttgcaacggcaccggcaaccaggtcgggcgattttccgcttcgtaagccacttcgtacgcggccttctccaggctgaacaacgtcagcgctgcgtcctggcctttggcatcctgccagtcatgcgccagtgtagacgtagcctgatgataagcctggataaatgccgcgcgcgcttcattcaagtaacggtcggtcacacgcctgcgggcaatgtccgcttcgggcgagtgatcaacgccttgcacattcagggccatggccgctgcgtaatcaaacgagcgcaacacaccgctcacatctttatacgggctgtgcttgccgcgccgctcgtgcaatgggcgcgccggctcgccttcaaagtcgatcaaataggcatcgcccttgaccaccaatacctggcccaggtgcaagtcaccgtggacgcgaatccgcaacccgcccgccgtggctttcgccagggcctgaacgtagctgccgatggcctttttctgcgccagtaattcactgaccaatgcctgatcagcggggttcaactggctttgatgaagttttagtaaatgcagggcgcggtcgatctgcgcccccacgtccttggcccaggcttgagtgtccttggcggtggtggcttcaggcttgaagtctttgttggcggtttttgccgccagcaccacgtgcatttcgcccaggcgctgacccagcaaaccggcaaagtcctgcagctcgccgagggcgttgtaatgctgttcctgctcggacatcgcctcggccagctcatcgcgaatcgcccgctccaggctgttttgcgtccaggcccaggcatcgccctggttgcttagatagccttgggcaatcatcagcaggttgtcttgccctgccccgtcgcgacgcaccatcgaacccagcagcggcgagatattcgggtaaccggcggccgtcaggtaggcactcatttccagttccgggtggaccccggtgctgactttgcggatcagcttgagcaccaggctctcgccgaccaccaccgagctgttggactgttcagcagacaggtagcgcacctgggattcgtcactcaggtgcaggttggccaggtgcggggtggcttcaaaacgcaggtcgccgtcggtggagttcagcaccgtaccggcctgcaagctctggatgacggcgcgaatgaaatgctccaggctgaaggcatcggtgaccagacccacctgtcgcgtgcgacgcacgcgggccagggccagttgttgcggcaaggcgctggtgaactgatcctcgccgagaaagccgaacggcagttgataacggctgacctgcccgccgctggtgacttcaatttcactgagcagcaccgggtgctccgggtcgccaaaccgcacgccgtaggcaatgtttacctgctcaatggccgcgtccttgccggcaaaccagcgtcgtttgggcagccaggccggcaacgaggtttgctccaggctggtgcggcacggttcttcaagcaactcttccatgcgctttttcaagaccagggtggtgaagtccggaatgctctgcgccggttccacatgccagctgggcatctggttttccgccgccagcacgaaccagtaaaagccgtaaggcgccagggtcagcaggaaattgagctggccaatcggcgggaacgcgttgccgccgagcatctccaccggcaccatcccggcgaacgccgacaggtccagctcggctgcctgggcactgcgtgacacgttagccacgcacaggatgatttccgtgcggccatcgtccccggtgtattcgcgggtgtacgccagaatgcgccgattgctcggcgagagcattttcaagctgccacggccaaaggccttggactgtttgcgcaccgccaacatgcgccgggtccagttcagcagcgaatgcgggtcctgggtctgggtctcgacgttgaccgactggtagccgtacagcgggtccatgatcggcggcagcaccaggctggccgggtcggcgcgggagaaaccgccattgcggtcgatggaccactgcatcggcgtgcgcacgccatcgcggtcgcccaggtaaatgttgtcgcccatgccgatttcatcaccgtaatacagggtcggcgtgccgggcatcgacagcagcaggctgttgagcagctctacgcggcggcgatcgcgctccatcagcggtgcgagacggcggcgaatgcccaggttaatccgcgcgcgacggtcagcggcgtagtagttccacaggtagtcgcgctccttgtcggtgaccatttccagggtcagctcatcgtggttgcgcaggaaaatggcccattggcaattggcaggaatctccggcgtctggcgcagaatgtcggtgatggggaagcgatcctcctgggccagggccatgtacatgcgcggcatcagcggaaaatggaaggccatgtggcactcgtcgccgtcatcgccctttttgtcgccgaaatacagctgcgtgtcctccggccattggttggcttcggccagcagcatgcggtcgggataatgggcatcgatctcggcgcggatctgcttgagcacgtcatgggtctcgggcaggttctcgttgttggtgccgtcacgctcgatcaggtacggaatcgcgtccaggcgcaggccatcgatgcccatgtccagccagtaacgcatcaccgagagcacggctttcatgacttgcggattgtcaaagttgaggtcgggctggtgcgaatagaagcggtgccagaagtactggccggcaaccgggtcccaggtccagttggacttttcggtgtcgaggaaaatgatgcgggtgccgtcgtatttctggtcgtcatcggaccacacgtagaaatcccgcgccgccgagccgggcttggccttgcgggcgcgctggaaccaagggtgctgatcggaggtgtggttgatcaccagttcggtaatcacccgcagcccacgcttgtgagcttcggcgataaaacgcttggcgtcggccatcgtgccgtaatcgctgtgcacgccacggtactcggcgatgtcatagccgtcatcgcgacgtggcgaggggtagaacggcaacagccagatggtgttcacgcccaggtcggcgatgtagtcgagcttggcgatcagcccgggaaaatcgccgataccatcgttgttggagtcgaaataggatttgacgtgaacctggtagatcaccgcgtctttgtaccagagcgggtctttgatgaaggtggaagcgttgggtttcttcgccattggaaactcctgggaatacttgaaaaaccgcctgaataaacgcggttaatgtgggagctggcttgcctgcgatggcgtgactgcggtcttcctgaaccaccgcgccgccttcatcgcaggcaagccagctcccacagttgatcttcatttggctcaggaaacggtgatacgccagataccaaacggggtgtgcggctccagccgcatccactgggttttgccgtaccaggtccagcgatggccgttcatcaagtcttcgccctgggtttgcgcatcgtcgggcaggcccaattcccataatggcaattcgaaattggcttcctgggcgttgaacggatcgaggttgacggcgaccagaatgaaattgctgccatcggtgctgcgtttgccgaagtacagaatattgtcgttccaggcgttatagagcttcaggcccaggtgcgtgtgcagcgccgggttctgccggcggatgcggttgagctgggcgatctcggcaatgatgttgccgggcgcggtgaagtctcggacgcggatctggtatttctccgaatccaggtactcctctttgcccggtacgggcgcggcttcacacagctcaaagcccgaatacatgccccacaagcccgaccccatcgtggccagtgccgcgcggatcaaaaagcccggccgcccggattcatgcaggaacggcgggttgatgtccggagtgttgacgaagaaattcggccggtaacactcgcgccacggcgactcgttcaattgcgtgaggtattcactgagctcagccttggtgttgcgccaggtaaaataggtgtagctctgggaataaccgaccttgccaaggcgcgccatcatcgccggcgtggtgaaggcctcggccaggaaaatcacctcggggtatttggaacggacatcactgatcagccattgccagaatggcagcggcttggtgtgggggttatccacgcgaaaggtcttcacaccctcctccacccagccgaccacgatgtcacgcagttcggtccacaggctggggatcgcatcggcggcgtaaaagtcgacgttaacgatgtcctggtatttcttcggcgggttttccgcgtatttgatcgtgccgtccgggcgccaattgaaccagcccggatgctgtttgagccacgggtggtcctgggaacactggatggcaaaatccagggcgatttccaggccgtggtcggcagcggccttgaccagccgacggaagtcgtcgcggctgcccaattgcgggtggatggcttcgtggccgccgtcttcactgccaatcgcgtaggggctgcccggatcatccgggcctgcggtcagggaattgttcgggcctttgcgatggctgcgcccgatggggtggatcggcgggaaatacagcacgtcaaagcccatgtcgtggatcatcgacaggcgcgagtgcacatcattgaacgtgccgtggcgcgcgggatcatcggtgatcgagcggggaaacaactcgtaccagctggcaaactgcgccgctgtgcgctccacgtcgatggggcagacggtgctgatgctcaaatacgcgcggtgatccgcctgggtcatcaggtgtgcactgtcatcgtgcagaaacaacgcgacctgctcggtttccagcaacccggaaagctcgtggtgcagcagcatcaggcggtcgcgcaattcattgtcactgcgctcggcggcctgcaacaccaggctgcgaccctcctgcaattccaggctgaccggcaccccggcctcatgtttcttgcgcagttcgtagcagaagctggcgaaggtatcgatccaggcttcaatgcagaattcgtgcgggccttgggtggtaaccgtgaacgcgccttcccagccattgttgcccacgtcggccatcaccacgctgtgccagctttcatcctgcagcgggcgccagcgaatcagcacagccagcttatcgtggccgtcggcaaacactttgctggtgacatcaacctgctggcctaccacggccttgaccgcaaattcgccgccgtcgatcactggcgtggtgctttcaatcgcgatcctgggaagcagcaatgcctgggacagcggcaatctggagtcttctggagtcagtgtttcagcagtcatcgagcatcttccccttacgccctgtggacgctctttgcttgatccgaattctgaggcggcagcgctctccctgagcagggccgtaataggtccgagcccgggggcgcgccaaaagttcaggtggatgtgccgccatccggcggggaatcaattcgccggtgcgggtgtccaccgctagagcaaagcacactcgatagaacaaagcacaaaggaggccacaccgatgaatatcccgatcccggctgaaacccctgatcccaatatcgataatccaaccctgccgcccaccgaaccggaaccgattcccgagaaagaaccgcctgaaaacccgccgccacccgtggaggagccaccgacgaccatgccgccggtgattgtcagtccttctcaaaccgcttgacgatctttggcatcacgctgaacaccgccaaggccagcaacgtactgagcaccgctgtcgattcccggcccaacccggccgagaccccaatcgcagcggtcatccacaggccggccgccgtggtcaggcctttgacatggccttcttcatcatccttgcccttgatgatggtgcctgccccgaggaagccgatgcccgcaatcacgccttgcaccacccggctcatggcatccgcctgattaccggacatctgcggcaccatcacaaacaacgcagcgcccaaggccaccagcatgtgggtgcgcaccccggcggccttgcccttgctctctcgctcgaaaccgaggatgccgcccagcacggctgcgatcagcaagcgcacggtaatctgagtgagttgcctggcatcgccgatgtcggcaaattcggcctgcagggtttgccacacttcatgccaccaggcgtccatgaataccttcctttgtcgggttgatacagggttgacaccggcgaccgccagtcagttgccttgaaccccggcgcatgacgggtccctaacctgaatagcccacaaataaggagaacggcatgccactgcgtatcgaaaaccagctgtgctacttcacgctcgacgacaacgggcaggaacaaagcgtgccagcgactcgggtcactatcgtgaccgacaccgacaaatccatgtcctacgtcgaattggcggcagagcgcatctacatcaccgaagccgaggctgatgcgctgaccgtcgcgggggcccacgatggtcgccagcatgtaaaggccgaggagcctggttcgctgatttgactgatctgtgtcaggccgcgcataaaaaacgctgcgccccatacgccatggggtgcagcacaatgtcgcaggcaaccttcgaagcaccttctgatacggtttttatcgctctagctgagtctgttatgaaatcagcgcgacgctcatagtttgacggcctgatggaggctgatgagcgaacgaccatgagcgaaagaatcccgaccgtggaaacctttgagcccatacacccaaagaaggtgaaggccaaatccagtgacaccctgatccatacccgcagcttcacaggcctgtaccgcaccttgcgggtgagcggcgcggcgttgctgttcctggcctttttcggcaccgtctggctgaactggggtgggcgccaagcggtgctgtgggacttggccgagagccagtttcacatcttcggtgccacgttctggccccaggatttcatcctgctctcggcgttgctgatcatctgcgccttcggcctgtttgcgatgaccgtgtttgcagggcgtgtctggtgtggctacacctgcccgcaaagctcatttacctggctgttcatgtggtgcgaaaaagtcaccgagggggagcgcaacagtcgcatcaaactgcaggcagcgccgtggaacctgaacaagctggcgcggcgctcggccaaacacacgttgtggctgggcatcagcgtcatgaccgggctgacctttgtcggctacttcacgcccatccgccccctcgccgccgaactgctgaccttgcaaatgggtggcgtgagcctgttctgggtactgttcttcaccgcggccacctacctcaatgccggttggttgcgtgaagccgtgtgcatgcacatgtgcccgtacgcacggttccagagtgtgatgttcgacaaggacaccctgaccatttcctacgacgccgcgcgtggcgagcgccgtggcccgcgtaaacgtgaggtcaaccctgctcaggctggcttgggtgattgcattgactgccaactgtgcgtgcaggtgtgccccaccggcatcgacatccgtgacggcttgcaaatggaatgcatcggttgcgcggcctgcatcgatgcttgcgactcgatcatggacaagatgggttacgctcgcgggctggtcagctatacctccgagcatcaactgcaaggcggcaacacccacctgctcaggccgcgcctgatcggctacagtgccgtgctgctggtgatgattgccgcgctgatagtcgccctggtggagcggccgatggtttcgctggacgtgaccaaagaccgtggcctgttccgtgaaaacagtcgggggcagatcgaaaacatttacagcctgaaagtcatcaataaaacccagcagcgccaggactatcggctcgaactgctgaacgcggatggcttccagttgcaaggcaggacgcagctcagcctggcgccgggggagatcagcgacgtgccggtgtcggtggcgctgttggtggacaagccggcgagcagctcgcaaacaattcgcttcaaggtaacggatgtggatgaaccgtggatcttcagtgctgccgatagccgcttcgtcgccccgttgaaccgctgaaatttcactgactacagagatcaaatgtgggagctggcttgcctgcgatggcggtgtgtcagtgttcatatttagcagctggcccaccgccatcgcaggcaagccagctcccacattttgtcctgcgcaaaagtcaagaacgctaatcaggccaccatgaaacgctacgaaaaattcgccgatgacattgcagaactgatccgctccggcgtcctcggccccgggcagcgcgtgccttcggtgcgctatgccagccagacctacggcgtcagcccgtccaccgtattccaggcctattacctgctggagcgccgtggtctgatccgcgcacggccgcgttccggctacttcgtcaacacccatgcacccagcccgttttccgagcccgtggtgagtgagcacgcgcatgaatccaccgaagtcgatgtgagcgaactggtgttttcggtgctcgactccatcaaggaccccaataccgtgcctttcggctcggcgttccccagccccatgctgtttccgttgcccaggctggcgcgctccctggccagcgcgagccgcgagatggacccgcgcctggtggtcaccgacatgtcgccgggcaacccgcacctgcgccggcaaatcgccctgcgctatatggtgggcgggctgatgctgcccatggaagaactgctgatcaccaacggcgccctggaagcattgaacctgtgcctgcaagccgtgaccgaaccgggcgacctggtggccatcgaagcaccggcgttttatgcctgcctgcaagtgctggagcgcctgaagctcaaggcggtggaaatccccgtgcacccgcgcgacggcatcgacctcaacgccttggcgcaaagccttgagcgctacccgatcaaagcctgctggaccatgaccagtttccagaacccgatgggggccacgttgcccgaggcgaaaaaacgggcactggtagaactgttgcgcagccatcaggtgccgctgatcgaagacgacgtttacgccgagttgtattacggccaacaggcgcccaaaccggccaaagccttcgacaccgaggggctggtcatgcactgcgggtcttttgccaagagcctggcgccgggttaccgcgtcggctgggtagccgccgggcggtttgcacagaaggtcgagcgcttgaaattgatgacctcgctgtgcccgtcgatgccggcccaggccgcgattgccgattacctgcaacacggcggttacgaccggcacttgcgcaaattgcgttatgccctggaagagcaacaaagcgcgatgttggccgccatcgcccgctacttcccgccccagacgcgggtcagccagccagctggcgggtatttcctgtggctggagctaccggagcaaacggattcgttgaagttgtttcagatggcgctggcccaaggcatcagcatcgcaccggggccgattttctcggcgacccggcgtttcaggaattgcattcgcctgaattatggaagcccgtggtcggaagtctccgaaaaggccatggaaacgctggggcggattgtgcgatcgttttaaaccggaaccggacccaaaaaatgaccacacaggaaggcgcactcttctcacattgaagattgcatcttcccaggtccaattttaggttcccatgagcatgcctattcccgcaaaccttacaccgctgcccatcccttccaattacatgcgcatggctgaacaacagcagttgcgcgaaatgacgggccccgagggtcgtcctgccggtgatcatcgctcggcagaaaggatcatcgaacaaagcgccgtcttaaggcgcttcctggacaaccgtgacaactatcacttggtcgatgaactgaagatgcagctgggtgactggaccctcggtaatccagactcaaaatcccgggcggatgcggcctacgctctggacaaggtcttgcgttttatcgacaacgtagatgatcgcaccctcaacgacagccacagccgcaatggctacatcgacggttttgcggatagcggctgtggcgtcgtggacccttcggaagccagcctgttgaaggcgttttcccgcaagggctacgaagtcttgcgttatctgccgacctgatcggctgccaccttaccggccaccgcccaaatccaggaacgtgccagtggtgtaggaagccttgtccgacagcagccagataatcgcttccgccacttcatccgggcgcccgccacgtgccatggggatccccgactccagcttgctgacccggtccggatcaccactcagggcgtgaaaatcagtaaagatgtaacccgggcgcaccgcgttgacacgaatcccttcacccgccacttctttggacaggccaatggtgaaggtatccagcgcgcccttggacgccgcgtaatcaacgtattcacccggcgaccccaaccgcgccgccaccgacgacacgttgacgatactgccaccctgcccgccatgccttggggacatgcgcagcaccgcgtgcttggcacacaggatcgggcccagcacgttggtcttgatgattttcaaaatacgaaactcggacatctcgtccacccgcgacttgtgccccaccgtgccggcgttattgaccagtgcggtcacacgccccaactcggcatccacgcggctgaacagcgcgatgacttcatcttcgatgctgacatcggcgcgcaccgcaatggcctgtgcacccagcgcgcgaacctgctccagcacacggtgggcggcctcctcgtcggactggtaattgatgcaaatccgatagccctggcgcgcagccagcaaggccgtctcggcgccaatcccgcgactgcctccggtgatgatgacgactttgtccatgcgtgcggtctcctgattcaacctgatggttagggttggatccaagaatacccgtcacgcacggcttttgtcagtcgtggccgcgacttcggcacgctggatgtcggccatgaatccgtccgccggcaacgggtgccccagcaaataaccttgcagggagttacaccccaggcgcgtcaggaaactctgttgtacatccgtctccacgccctcggcgacaatccgcaaacccagggcctgaccaagggcgacgatagccgaaacaatcgcagcgtcatcactgtcgtgctccaggtcgcgaacaaacccacggtcaatcttcagctcgttggccgggaggcgcttgaggtacatcaggctggaataaccggtgccgaaatcatcgatggacaggtcgacgcccatgtccgaaagctgttgcaacaccgtcatgctcgcatcggcatcgctcatggccgtggtctcggtgatttccagggtcaggctgttggcgggtaactggtggcgctccagcgccgccgcgacgcttttgaccagcccggcgtggcagaactgcaacgccgacaaattcaccgcaatgcgccagtcttcgtagccctgggcataccagagggccatctggcggcaggcttcattgagcacccactcgccaatgggaatgatcaggccggtcttttccgccagttcgataaaggtcgccggcagcaacaagccctgctgcggatgctcccagcgcagcaaggcttcggcgccgaccgcaatgccgctggcggcgtcgaacttgggttggtagtacagacgcaactgcccttgttccacggcgttgcgcagatcctgcagcagttgcagttgcttgcgcgcattggtgttcatcgacacatcgaaaaagctgtagccgttcttgcccatgcccttggcgtggtacatcgcggcgtcggcgttcatcagcaggtcctgggggttactgccgttgcccgggaacagggcgatgccgatgctggcggagattttcagctcatgctcggccaccttgaacgcacgattgatcaggcccacctggcgatcggccaggcccattgcatcgtccggctgggtcaattgcaccagcaacacaaactcgtcgccgccaatacgcgccagtgtgtcctggctgcgcaaatcctcgcgcagacgcaggccaacctcgcgcagcaattggtcacccatatggtggccaaaggcatcgttgaccggcttgaagccgtccaggtcgataaacatcagcgcaaagcagccgccctgctctttcaccacctcaatggcctgctgaatgcggtcggccagcagggtgcgattgggcaggccggtcagcatgtcgtgcagggccaggtgggtcaattcctggttggccagggtcagcgaatcggcgaggaccgccgtgcgcgcttcaagccgggcgtcgagcaacgaggtcaccagcgcgatcagcaacaccgccaacgacgtgaccaacaccagattatccaggcctttgccgctcaggccggtcagcgccgcgccacaaaaactgtcatcggcaaactgcgccgccgccatcccggtgtagtgcatgccgacgatggcaatgcccatcaccacggctgccccgccacgggccaggcgtacataaggcgtgttgcggcgcaggttgaaggcgatccacagcgcggcgccggaggcccccacagcgatcagcaatgaggcgccgaacagcgtcgggtcgtagtcgatacccggcgtcatctgcatcgcggccatgccggtgtagtgcatgctgctgatgcccgcccccatgatcagcgcacccaatgccaattgccacgccggcaagcgtggctggctgaccagccacaatgcaaagccgcaggacaacaccgcaatcagcaacgacagggccgtgatgcccaagtcaaaccccagggcaaacggcaggcgcaaggcgagcatgccgataaagtgcatggaccagacacccacgcccatggccagcgcaccgccggccatccacacatacactgcgcggcctttggcggtcgcgatgcggccggccaggtccagcgcggtataggacgccagtatcgcgacgaacagggagatcacgaccagagagggggagtagctaccgatcagcatgggctttctcgaaactgacgggcgtgagacgcccgtgccaggtggcaaagcgggcgattgtagcgagattaattcttgacgagttgattaattatcacggggccattagtggcgttttgacgccaatttgctggctcaaacacaatgggaattcagcgtccggctgagtccaaatgtgggagcccgctcaccactaaaagcttgctcaccacagcaagctcacacaagcccgcgcctgccttcagtcagcctttaccgctgtctggccgtcccaaccaccacccaatgctgcgatcagttgcacactggctaccaaccggttttgcaacaaggtcagcaccgtgcgctcgttgctcaacgccgtcgcctgcaccgtcaccacatccaggtaagcaatcaacccggctttatactggttctcggtcaaccgcagggattcgcgcgccgcgtccagcgcttcattgctcaccaccgcctcgtcttccaataccttcaactggaccatgtagttttccacttcgcgaaaaccatccagtaccgtctgccggtatttggccaccgtttcgtcataggtcgcgacggttcggtcaacctccgccgaacgctgcccgccgtcgaacagcgtcatcgccagtttcggccccaccgaccagaagcggttcggcaagctgatccagtcggcgtaggtactgctggagtaaccgcccgccaggctcaaggtcaagtccggatagtaggccgccttggccacaccgatgttggcgttggcggcaatcaccgagcgttcggccgaggcaatatccgggcggcgctccagcaactgcgagggcaggctcaccggaatctgcggcagcgccggaatgtcctggctcaccgccaggttgaaattggccggcgcctcaccgatcagcacggcgatggcattttccagctgggcgcgctgccagatcaaatcgatcaggctggcctgggtggtcttgagctgggtctgtgcctgggcgatcgcatccttgccggagacaccggcgcggtactggttttcggtcattttcagcgagcgctggtaggtatccagagtggcttgcaacaaacgggtctgctggtccatcacgcgcagttgcaggtagtcctgcaccagttccgattgctggctcaagcgcatcgccgccaggtccgcagagctggcttgggcggtggcttcattggcttccaggccacggcgcaacttgccccacacgtctgcctcccaactcacgcccaactgcgtattgagggtgtcacggataccgctgctggagctgctgaggctggcgttactgctgccggtgccctggctggcgcgggttttcccggcgctcaggtcaaccgtggggaaaaacgcgccccgcgcgctgcgtacctgggcctgagcctggcgaaagcgcgcctcggcctgggccacggtctggttggaattgttgaggcgtgtgaccagctcattgagttgacggtcaccgtacaactcccaccacgcgcctcgggccagggagtcactgggggtagcctgacgccacccctgggcctccttgaactgcgcaggctcgacgacttccgggcgtttatagtccgggccgatggcgcaggcgcagagcaaggcgccgcagagcactatcgcgagtaacttaataccgtggcgagggagcttgctcccgtcgggctgcgcagcggccccgcaaaagccagggagtgcttcgccctccagcgggagcaagctccctcgccacaggtcgggtgttgagtcggtcatagcgcggtgtccagggcagcatcggtacgcacgccgcgccaggcgttgaagcggtggcgcgcgcggtcgaggtagaggtaaaccaccggggtggtgtaaagggtcaggacctggctgaagaccaggccgccaatgatggtcaggcccagggggcggcgcatctctgcaccatcaccggcgccaagcagcaagggcaaggcgccgagaatggcggcgagcgtggtcatcaggatcggccgcaaacgcagcaggcaggcactgcggatcgattccagcgggcccatgcgctcattgcgctccagctgcagggccaggtcgatcatcaggatcgcgttcttcttcaccacaccaatcagcaggaacaagcctaatagggaaatcaggctgaactcgccccccgtgaggtagatcgcgagcatcgcgccgacccccgccgacggcaaggtcgagagaatggtcagcgggtgaatgtagctttcatagagaatgcccagcaccaggtacaccgcgaccaacgcgccgagaatcatgaacggctggcccttctgcgtcgccgcaaatgcatcggcggtgccggccatcttggcgatcacgtcttcgggcaacccgaccttggcaatcgcccgctcgatggcggccgtgccttgctccaccgtcaccccgggcgacatgtcgaaagcaatattttccgaggcgaactggccttcatggctgacgcggtcgtcggccaggctgttttcgtaatgggcaatggtcgacagcggcacccgcgcgcccgtggaggtgatcacctgcatctggttcagggtgatagggtcctgggcatatttcgggttgacctccatcaccacctggtactggttgaggctgtcgtagatggtcgaaatctgccgctggctgtaggcgttgttcaacaccgccgtgaccatgctcatgtcgatgcccaggcgtttggcctggtcgcggtccaccaccagcgtgacctgggccgcaccgcgcccttcgcgggcgtcgatggcggtcagctccggcagctcgcgcaaggcagcgaccactttcgggtaccacaggcgcaacgcggccaaatcgccgctttgcaggatgtaggaatactgcgcgctggtctggtcgcggctgccaccgaattgcaggtcctggtcggccatcaggaacaggcgcccgccgggcaccagcggcatttccttgcgaatacgttcaatcacggcctgggccgagatcttgcgctcggcgatgggcttgagccgcaccagcatcaccgcgttgttggtgccgctgttgccgccgatgaacccggccacgctgagtaccgcagggtctttgagcacggccttgcggaaggtctccatcttgggctgcatcacgttgaacgacagcccgtcatcgccgcgcacaaaaccgatcaactggccggtgtcctgctggggcatgaaggttttcggcaccaccacatacagcgcgatgttcacgccgatggtcaggaacaggctgagcagggtcaggcgccgatggcgcagcacccagtccaggctggtggcgtacacggccaccatgcggtcattgacccgttggctccagcgctgcaagccggtcatctgccccttgatatgcggcttgagccaccgcgcgcagagcatcggggtcaaggtcagcgagacgatcagcgacacgatgatcgccgccgacagggtgatggaaaactcgcggaacaggttggtcacgatgccgcccataaacaggatcgacaggaacaccgcgaccagcgacacgttcatcgacagcaaggtaaagccgacttcctgggcgcccaggtacgccgccttcatcggcggcacgccttcgtcgatgtgccgggaaatgttctccagcaccacgatggcgtcgtccaccaccaggccggtggcgaggatcagcgccatcagcgagaagttgttcagcgagaagccgcacaggtacatcaccgcaaaggtgcccaccagcgacaccggcaccgccagcgtcgggatcagggacgcgcgcaagttaccgaggaacaggtacaccaccagaatcaccagggccacggcgatcagcaaggtcatctcggcttcgtgcaaggtcgcggtgatgaccggcgagcggtccatggccaggttgagcttgacgctggacggcaacaccgcctgcaacgccggcaactgcgccttgatctgccggaccgtctcgatgatgttggcgccggactggcggttgatcaccagcaatacggccgaatcattgttgaagaaaccactgttgtagcgatcttccacgccgtcactgatcttcgccacatcgcccaggcgcagcgccgcgccgttctggtagcgaatcagcaacggctcgtagtccttggccttttccagctggtcgttggcctggatctgccagttgcgctcgctgtcttccagcgagcccttgggccggcgctggttggcgttggcgatggtgttgcgcacatcgtccagggccacgccgtactggtccagcgccttgggttccagctcgatacgcacggccggcaacgaactgccgccgatctgcacttcacccacccccggcacctgggacaggctttgcgagaggatggtggacgccaggtcgtagagttggcccttttgcaacacgtccgaggtcagcgacagcaccatgatcggcgcctgggacgggttgattttcttgtaggtcggcatgctgcgcatgccgctgggcagcaggttgcgcgaggcgttgatggcggcctgcacttcccgcgccgcgccgttgatgtcgcggtcggaatcaaacgccaggatcacccgcgtggagccctggctcgatgaactgctcatggtggtgatgccggcaatcgctccgaacgagcgttccagcggtgtggccacggtagacgccatcacctcggggctcgcgccgggcaagctggccgacaccacaatcaccggaaagtcgatctgcggcagcggcgacaccggcagcaggttgaagctgacgccaccgagcaacatgatcgccaggctcagcagcatggtggcgaccggccggcgaataaaaggccctgacaggttcatgactcaaccggctccaggctttgcggctctttgcgccagcggcggccaaggcggtcgaaatacaggtagatcaccggcgtggtgaacagggtcagcacctggctcaccagcaaaccgccgaccatcaccaaacccagcggctgacgcaattccgcgcccgaaccggtggccagcatcagcggcaccgcaccgaacaacgcggccagggtggtcatcaggatcggccggaagcgcagcagcgccgcctgataaatcgccgtctgcgggtccagcccctggttgcgctcggcgtcgagggcgaagtcgatcatcatgatcgcgttctttttcacgatgccaatcagcaaaatgatgccgatgatcgcgatcatgcccaagtcattgccactgagcagcaacgcgagcaaggcccccaccgccgccgacggcaaggtcgaaagaatggtgatcgggtgaatgtagctctcgtacagcacacccagcacgatgtacatggtcaccaccgccgccagaatcagcagcaaggtgctcgacagcgaagcctcgaacgcctgggccgcgccctggaactgggtctgcacgcccaccggcatgccgatgtctttctgggtctggttgatcagctccacgcccttgcccagcgccacaccgggcgcgaggttgaatgacatcatcaccgccgggaactggccgatgtgggcaatcgccaattgcgcctggcgctgctccacatgggccaggctcgacagccgcacctggccgccgtcagtggttttcacgtggatctggttcagcgccgccgggccgagggtttcacccgattgagcctgcaacaccacgcggtattggctggcctgggtatatatggtggaaatctgccgctgaccaaacgcgtcgtacagcgcatcggtgatggtcgacacactgacgcccaggcgcgaggccgcgtcgcggtcgatcaccaggaacacttgcaagcctttgtcctgcaggtcactggcgacgtcggtgagttccggcaactggctgagggcgtgcaccagcttgtcgctccacagcgccagcagctcggcgtcgggcgatgacatgctgaactggtactgggtgcggctgacgcggtcttcgatggtcaggtcctgcaccggctgcatgaacaggcgaatgcccaccagcttgtcgatttgcggctgcaagcgcgtgatgatttgcgcggcgctgaggtcacgctggccgtggggcttgaggttgatcagcaggcggccactgttgagggtggcgttatcgccgtccacgccgatgtaggacgacaggctttcaaccgacgggtcggccagaataaccttggccagttcctgctggcgctggctcatcgccgcgaaggaaatcgattgcggcgcttcggaaatcccctggatcaccccggtgtcctgcaccgggaaaaagcctttgggcaccaccaggtacagcaccaccgtcagcccgagcgtggcaatggccaccagcaaggtcagcggctggtgcttgagtacccactgcagtttgcgcccataggcttcgatcagccagtcgatccaggccccgctggccttgtagaaacggccttgttcttcttccttgggctcacgtttgagcagacgcgcgcacatcatcggcgtcagagtgagggataccaccagggaaatcaggatggccaccgccagggtaatggcgaactcgcggaacaaacgccccaccacgtcagccatgaacaacagcgggatcaataccgcaatcagcgacagggtcagggacaccagcgtgaagccgatctgcttcgcacccttgagggcggcggccatcggtgtctcgccctcctcgatgtaacgggagatgttctcgagcatcacgatggcgtcgtccaccacgaagccggtggcgatggtcagcgccatcagtgtcaggttgttgatcgagaagcccgccaggtacatcacgccaaaggtgccaatcaaggacagcggtacggcaatggacggaatgatcgtggcgctgactcgccgcaggaacaggaaagtcaccatcaccaccagggcaatggcgatcagcaattcgtgctgcacgtcggtaaccgaggcgcggatggtctgggtgcggtcggtgagcaccgtcacgtcgaggccggccggcaggttgtcggtgatgctcggcagcaaggccttgatacggtcgaccacctcgatcacgttcgcacccggctggcgctggatattcagcagcacggcctggttttcgttggcccaggccgcgaggcgctcgttttcggcgccgtcgacgatttgcgcgacatctttaaggcgcaacggcgcaccgttgttgtaggccaggatcagctcggcgtattgctggggcgagaccagttgatcgttggcgtcgagcatcgacacgcgggtcgggccgtcaaagttacccttgggctggttgacgttggaggcggcgatcagggtgcgcacgtccgacaggttcaagccattggccgccagggcctcggggttgaccttgatgcgcacggcctggcgctggccaccggcgatgctgaccatgccgacaccgctgatctgcgcgattttctgcgccatgcgcgtgtcgaccaaatcattgagcttgggcaacagcatggtcttggaggtgattgccagggtcagcaccggggtgtctgccgggttgaccttgttgtacaccggcggcgccggcaaatccttgggcaacaggttagtggcggcgttgatcgcggcctgcacctgttgctcggcgacatccatattgatgtcgaggttgaaacgcagggtcagcaccgacgcgccgccggaactggtggaggccatttgcgtgaggcccggcatttgcccgaactggcgctcaagcggagccgtgaccgcactggtcatcacatccgggctggcgccggggtagagggtcatcacccggatggtcgggtaatccacttgaggcaaggccgagaccggcagcaggcgatacgaaatgatgccggccaacacaatggccagcatgctcagcgtggtggcaaccgggcgaaggataaacagccgcgacaggttcatgcgccgaccttttgcgccttgccggcgtcagcgccggtctcccctttcgccgcgggcttgccttgcaggtgctcggtcggcgtggtcggcacgtcactgctgtcattgaccacttcgatttcgctgccgtctttcaagcggtcggtgccttccagcaccacgcggtcgccggccaccaggccttccttgatcacggtgttgtcgccatcggtttcaccgactaccagcggctggactttcaccttcttgtcgccatcgagcttgtagacgaaggtgccgttgttgccgaactgaatcgctgcggacggcgccagcaccacattgtgcagggtgtcggccagcaggtgcacattgacgaactggttggggaacagcacctggtccttgttatcgaagcggcccttgaatttcagggtgccggtggtcacgtcgatctggttgtccaggctttgcagcacgccgaccgcctgctttttcacgtcgccacggtcccaggcttccacgggcaatttgttgccggcgtggtagcgggcaagcacggtgtccagggtgttttccgggagggtgaagaccacgctgatcggctgggtctgggtgatcaccgcgagaaaagtggtgtcattcgctgccaccaggttgcccacgtcaacctgacgcaagccgacccggccgctgatcggcgcgcggatccgggtgaattcgaggttgagcttggcgtcatccaccgcgccctggttggtcttgaccgtgccctgatactgcatgaccagcgcttcggcggtgtccagggtctgcttggcaatactgtcctgagcgtacaggtcgcggtaacgctgcacgtcaacctgggcgtttttcaactgcgcctggttctgcagcagtgtgccctgggcctggagcaaggcgttctggtagctgcgcgggtcgatttcggccagcaggtcgccggccttgaccatctgcccttcttcaaaggcgaccttcaccaactcaccgcccacccggctgcgtacatttatcgtgttgagcgcggtgaccgtacccagcgccttgtaatagaccgggaactcacccagcaccgtcggcgccacgcgtaccgggatcgggccggtggaacccccgaagcccgggcgcatcatccccgacttgccggcatgcccggccggtttcttctcggcagcatccttgcggttgccgggccagaatttccagcacaggccggcgataaccagcagtaccagcaggccgaacagccagcggcgggaatgacggggggaggattgcatggagtgatcaaccattgggcgcgagagcttcttctttgggaggctgaaagataagcactggggcgcattaagaaaagcgcctttaccggctatttaccttggacttacaacttttaacttctgaccttagtccgtggcctatttcgctaagcgtttgagccctaaataaaaacggcctggactaggccaggccgcaatcatgcatcaagcgtgttactgccaaacgacagtaatgcgccgaaacagttacttcaaaacagccagggctgcttcgtagttcggttcctggccgatttcagcaactagctcgctgtgcagcacgttgttgttctcgtccagtaccacgacggcacgggcggtcaggccacgcaatgcgccttcggcaatcgaaacaccgtattcaacggcaaaacccgggtcacggaagtccgacaggtttttcacattttccaggccttcagcgccgcagaagcgcgattgtgcaaacggcaggtcgctggagatgcacagcacaacggcgttgttcaggtcattggcctgagcgttgaacttgcgaaccgaagtggcgcaggttggggtgtccacgcttgggaagatgttcagcactttgcgcttgccggcgaaagtggccagggttgcgtccgacagatcgccggcggtcaagatgaagtctggagcctgggtaccggtttgcggcagctcgccttcaaccttgattgggttgccacggtgggtgacttgagccatgaacggaatccttatgctggtttattgaaacgaattcgagaggccgaagttaaccacaaagtgcagtgactacctaccaccccacacaaattgtcatgccgctcaggtgtggtttaattgcgcgcttttcgcccgcccttcaaggatctgctttagatgaatcagcccgccaccaaagtcctggtcattggttacgtctggccggaaccccgctcctcggccgccggcgggcacatgatgcagattctgcagagcttcctcgaccgggggtgggccatcaccttcagcagcccggcggccctcggcgaacaccgggcggacctgccggcgctgggaattgctgaatgcgcgatcgagctcaataacagtagtttcgacgattttatctgcgagctggccccggatatcgtgctgttcgaccgtttcatgatggaagaacagttcggttggcgcgtcgagaaacactgccccgccgccctgcgcgtcctggaaacgtgcgacctgcaaagcttgcgcgatgcgcgccatcagcgtctgaaggtgcacctcaaggctcatcccgacagcgacgactgccgcgcgttgtttgcgcaaacccaggagaaagagttcgaaatgatggccgacacggacgtggccaagcgcgaaatcgcggcgattttccgctgtgatatcagtttgatgatttctgacgtggaagcccgcttgctcaccgagcaattcaatgtaccggccgccctgctccattggtgcccattgatgcttgagccgccgaccggtcccttcgcgccgtttgaagaccgcgcgcacttcctgagcatcggcaacttccgccacgcgcctaactgggatgccgtgctctggatgaaaaacagcctgtggccgttgattcgccaacagttgccaggcgcacaattgcatctctacggtgcctataccccgcccaaggccagcgccttgcacaacccggcccagggttttcatgtgatgaactgggcgcaagatgccttgcaagtgatgaccgcagcgcgcatctgcctggcgccgttacgcttcggcgcgggcatcaagggcaagctggcggatgcgatgctgtgcggcacgccgaatatcaccacgccaatcggcgccgaagccatgggcgacgatcagccgtggcctggcgtgattgaacacaatgcccaggcgttggcggatgcggccgtggcgctgtatcaggaccgcgagcgctgggtccaggcccaggaagatggccgccagttacttgcccggcgctatgacaaagccctgcatggcccggcgctggtgggctgcctggagcgttgccttggcgacctggacgcccatcgccggcgcaacttcactggcagcatgctgcgccaccatgcgcataaaagtacccagtacatggcgcaatggatcgaggcgaaaaatcgcttggtttaaacaccggcgctggcgaggtggcgcgcaagggggcattatcccgtgcagcaaccacaataaagcgacggcagcatgacccgagcaacgcgcatcaccgacccttcctacgagttgatggacgaccataacggcctgtccatcatctatcgccagcacggttttccctgcccactggtgcgctggcacttccacaaggaatacgagctgcacctgatcgtcgccagctccggcaaggtgtttatcggcgactatatcggcaatttctaccccgaaagcctgtttctcaccggccccaacctgccgcataactggatcagccaggtggaggaagacgaggtcgtgcccaagcgcgacatgctggtgaacttcaccgatgagctgttcgagagcggcagccagatcttcgctgaactcaagaccctggcgccgctgttggagcgcgctcaatacggcatcgaatttcgctgcaaaaaaaccatcgcccaggccatcagcctgatgcaacgcatcgaggacgcccagggcatggcgcgtctggggcactttttcatcctgctggaggtgctcagtgcctgcgaggactaccagttgctgtccggcgtgaccacgccgcaactggccgacgaacacagcatcgaccgcaccaaccgcgcggtggactacatctttgcccactacgcgcgggagttgccgctggaggaagtggcggattacctgggtatgaagccaacgtatttctcccgggtgtttaaacaggccaccgggcgtacgtttatcgagttcgtcaaccggctgcgcatcagcaagtcgtgcgaattgttggccgacggtgacaaagcggtgacggatgtgtgctttgagtcgggcttcaacaatatttccaatttcaaccggcgcttccagcagctcaagggcatgaccccttcccactatcgccgcctggcggttcagcgtttgacggagcagaacctggcctgaagccagcggccgggttgccttctgtgggagctggcttgcctgcgatgcgggcacccaggtgtgtcaggtggaccctgtcgatgccatcgcaggcaagccagctcccacagccaatcaaagcgcagtgcaaaaaagtatcagtccaagtgcgcccaaggatttgtcacatcaccatttcaaggctgtaatcaaccgcacactcttcctgactctctgtaggaagacacaacaacaataactgtccttctgtagccccctgggcgcggaaacggagtgcgcgatgaagttcacagcaaaagctctgcttgcctctacctgcatgatgacctgcatgaccctcagcgccgtcagccttggcgcgcaaaccctgaccattgccaccgtcaacaacagcgacatgatccgcatgcaaaaactctcgaaaaccttcgagaccgagcacccggagatcaagctgaactgggtggtgctcgaagaaaacgtgctgcgccagcgcttgaccacggacatcgccacccagggcgggcagttcgacgtgttgaccatcggcatgtacgaagctgcactgtggggcgccaagggctggctggagccgatgaaagacctgccggcttcctacgaccttgatgatgtattcccttcggtgcgtgacggtttgtccgtcaagggctcgctgtacgcgctgccgttctacgccgaaagctcgatcacctattaccgcaccgacctgttcaaggacgccgggctgaccatgcccgagcacccgacctggacccagatcggtgaatacgcggcaaaactcaccgacaaatccaaagaacaatacggcctgtgcctgcgtggcaaagccggttggggcgagaacatggcgctgatcaccaccctggccaacggctacggtgcgcgctggttcgatgaaaaatggcaaccggaattcaacggccccgagtggaaagacgcgctgaacttctacgtcgacaacatgaaaaaatccggcccgccgggtgcttccagtaacggcttcaacgaaaacctggcgctgttcaacagcggcaagtgcgcgatctgggtcgacgccagcgtcgccggctcgttcgtcaccgacaaaacccagagcaaggtttccgaccacgtcggctttaccttcgccccacacgaaaaaaccgataagggcacgtcgtggttgtactcctggagcctggcgatcccgaccagctccaaagccaaggacgccgccaaagtgttcaccagttgggcgacttccaaggaatacagccagctcgtggccaagaccgacggcatcgccaacgtaccgccaggtacgcgcaaatcgacttacagcgacgaatacatgaaggcagcgccgtttgccaaagtgaccctggaatcgctgaaagtcgcggacccgaccaaaccgacgctcaagccggtgccgtatatcggtatccagttggtgaccattcctgaattccaggcgattggtacccaggtcggcaagttcttctcgggcgcgctgaccggtcagcagacggtggatcaagccttgaccgccgcgcagaccaccaccgagcgtgaaatgaagcgggccggttatcccaagtaaagccggtcccccccgtaaatgtgggagcagggcttttgtgggagctggcttgcctgcgatgcagacaactcggtctgtcagttacaccgaggtgatgccatcgcaggcaagccagctcccacatttgatcgcgctccgactttggttctgcatgtaatcgactggctttgatcaccatgaatacacccgccaaaaaccgcctggccaaccccggctggttcctcgtcagcccctcggtggccttgctgctgctgtggatgatcgtgccgctgggcatgaccctgtacttttccttgatccgctacaacctgctctaccccggtgaaaaccaattcgtggggctggagaacttcacgtacttcatcacggactcgggcttcctgcccggtgcgaccaataccttgctgctggtcggcagcgtattgctgatcagtgtggtgttcggtgtgttgatcagcgccctgctggaggccagtgagttcttcggccgcggcatcgtacgggtgttgctgatttcgccgttcttcatcatgcccaccgtcggtgcgctgatctggaagaacctgattttccacccggtgtccggcgtgctcgccgccgtgtggaaactgttcggcgcagagccggtggactggctggcgcattacccgctgctgtcgatcatcatcattgtgtcgtggcaatggctgcctttcgccatcctgctgttgatgaccgccatgcagtccctcgatcaggaacaaaaggaagccgcgcgcctggacggtgccggggccatcgcgatcttctggcacctcaccctgccccacctggcccgcccgattgccgtggtggtgatgatcgaaaccatcttcctgctctcggtgttcgccgaaattttcaccaccaccaacggcggcccgggctacgcctcgaccaacctcgcctacctgatctacaaccaggcgctggtgcaattcgacgtgggcatggcttcggccggcggcttgattgccgtggtcatcgccaatatcgcggcgatcatcctggtgcggatgatcggcaaaaacctgactgacaagccttgagggccgcgccatgacgcttcaacaatcccgccgcctgcaaagcctgttgctcggcacgttggcctgggccatcgcgatcctgattttcttcccgatcttctggatggtgctgaccagcttcaaaactgaaatcgatgcgttcgccacgccgccgcagttcatcttcacgcccacgctggagaactacctgcacatcaacgagcgcagcaactacttcgcctacgcctggaactcagtggtgatttccttcagcgccaccgccctgtgcctgttgatttcggtgccggccgcctactccatggcgttctacgaaacccagcgcaccaagggcacgctgttgtggatgctgtccaccaagatgctgccgccggtgggcgtgctgatgccgatctacctgctggccaagagctttggcctgctggacacgcgcattgcgctaatcatcatctacacgctgatcaacctgccgattgtggtctggatggtttacacctacttcaaggatatccccaaggacatcctcgaagccgcccgcctggatggcgccaccctgtggcaggaaatggttcgcgtgctgctgcccatcgccaagggcggtctggcctccaccgtgttgctgtcgctgatcctgtgctggaacgaggcgttctggtcgttgaacctgacctcctccaacgccgcgccgctgaccgcgctgatcgcctcttactccagccctgaaggtttgttctgggccaaattgtctgccgtttcgaccctggcctgcgcgccgatcctgatttttggctggatcagccagaaacagctggtgcgcggtttgtccttcggcgccgtgaaataacggcctcatcatttctatacggagggcccatcatggccaacctgaaaatcaagaatctgcaaaaaggcttcgaaggtttctccatcatcaagggcatcgaccttgaggtgaacgacaaggaattcgtggtcttcgttggcccgtccggctgcggcaaatccaccctgctgcgcctgatcgctggcctggaggaagtcaccgaaggcaccatcgaactggatggccgcgacatcaccgaagtgaccccggccaagcgtgacctggcgatggtgttccagacctacgcgctgtacccgcacatgagcgtgcgcaagaacatgtcgtttgcgttggacctggcgggcgtggacaaaaagctggtcgaaagcaaagtcagtgaagcggcgcgcattctggagctgggcccgttgctggagcgcaagcccaagcagctgtccggcggccagcgtcagcgtgtggcgatcggccgcgcgattgtgcgcaacccgaaaattttcctgttcgacgaaccactgtccaacctcgacgctgcgctgcgcgtgcagatgcgcctggaactggcgcgcctgcataaagaactgcaagcgaccatgatctacgtgacccacgaccaggtcgaagccatgaccctggccgacaaggtggtggtgctcaacagtggccgcatcgaacaggtcggctcgccgctggagctgtaccaccagccggccaacctgttcgtggcgggttttctcggcacgccgaagatgggcttcctgaagggtaaagtcacgcgcgtcgagagccagggctgcgaagtacagctggatgcgggcaccaccatcagccagccgttgagcggcgcgagcctgagcgtgggcagcgaagtgaccctgggcattcgcccggagcatctggaaatcgcctcgccgggccagaccaccctgaccgtcaccgccgacgtcggcgaacgcttgggcagcgacaccttctgccacgtcatcaccgccaacggcgagccgctgaccatgcgcatccgtggcgacatggccagccagtacggcgagacgctgcacctgcacctggacccggcgcactgccacctgttcgacaccgacggcaaagccgtggcccgcccactgcgcgctgccgcctgatttcgcgagatttgtgatgaaactgaataaacagaacctcaaccaattggcgccgcaagtcaaaattccggcctacgccattgccgatacccgccagggcatcgcccatatcggcgtcggtggtttccaccgcgcgcaccaggcgtattacaccgatgcgctgatgaacaccggcgagggcctggactggagcatctgcggcgtcggcctgcgcgccgaggaccgtaaggcccgcgacgatctggccggccaggactacctgttcaccctgtatgaactgggcgacaccgacgacaccgaagtgcgcgtgatcggctcgatcagcgacatgctgctggccgaagacagcgcccaggcgctgatcgacaaactggccagccccgagattcgcattgtctcgctgaccatcaccgaaggcggctactgcatcgacgacagcaacggcgagtttatggcccacctgccgcagatccagcacgacttggcgcacccgaatgcgccgaaaaccgtgtttggtttcatctgcgccgcgttgacccaacgccgcgccgccggcaccccggcgtttaccgtgatgtcctgcgataacctgccgcacaacggcgccgtgacccgcaaggcgctgctggcgttcgccgccttgcaagatgccgacctgcatgactggatcgccgccaacgtgagcttcccgaacgccatggtcgaccgcatcacgccgatgaccagtaccgcgcaccgcctgcaattgcacgacgaacacggcatcgacgatgcctggccggtggtgtgcgaaccttttgtgcagtgggtgctggaagacaagttcgtcaacggccgcccggcctgggaaaaagtcggcgtgcagttcaccgacgacgtgacgccgtatgaagagatgaaaatcggcctgctcaatggcagccacctggccctcacttacctgggttttctcaagggttaccggtttgtgcacgacaccatgaatgacccggtgttcgtggcctacatgcgcgcctacatggacctggacgtcacgcccaacctggcgccagtgcccggcatcgacctgacggactacaagcagacgttggtggaccgcttctccaaccaggcaattgccgaccaactggaacgcgtgtgttcggatggctcgtcgaagtttcccaagttcaccgtaccaaccatcaaccgcctgattgccgacgggcgcgaaaccgagcgtgcggcgctggtagtggcagcctgggccttgtatctgaaaggcgtggacgagaatggggtgagctacaagatcccggacccgcgtgccgagttctgccaggggctggtgagtgatgatgcattgatcagccatcggctgttgggcgtggaagagatttttggcacggctattcccaattcgcctgagtttgtggcagcgtttgagcggtgttttgcgagcttgcgtgacaatggcgtgacagccaccctacagaacctcctgaagaaaccggcttaaaagtgtgggagctggcttgcctgcgatagcaatctgtcagtcaccccatgattgactgaaccaccgctatcgcaggcaagccagctcccacatggacagcattttcacttcaacaataattaatgctgagcaccccaccatgacccagcaaaacctgtttctcggcatcgactgcggcacccagggtaccaaggccattgtgctcgacgcttccagcggcaaggtgctgggcctgggcgcggcggcgcacacgctgatcagcggcgccaatggccgccgtgaacagcacacccaggaatggctggacgcctttaccgaagccacccaccgcgccctgcaacaggccggcgtggacggccaggacatcctcggcatcggcgtttccggccagcaacacggcctggtgctattggacgagcaaggtgcagtgctgcgcccggccaaactgtggtgcgacaccgaaaccgcgcctgagaacgagcgcctgctggcctggctgggtggtgaaaacggctcgctggaacgcctcggcgtggcgattgcgccagggtatacggtgtccaaactgctgtggactcgcgagcaacacccggacatcttcgcgcgcatcgcgcatatcctgctgccccacgactacctgaactactggctcaccggccgcgccgtggcggagtacggcgacgcgtccggcaccggttatttcaacgtgcgcacccgggaatgggacgtggcactgctcaaacacatcgaccccagcgggcgtctcgaagcggcgttgccgccgttggttgaagccgatcaaaacgtcggcacgattctccccacgattgccgagcgcctgggcatcaacccgaatgcgagggtgtccagcggcggcggcgacaacatgatgggcgccctcggcaccggcaatatcgcccccggggtgatcaccatgagcctgggctcatcgggcaccgtctatgcgtttgccgaccagccgaatgtcagcccccaggcctcggtcgcgaccttctgctcatccagcggcggttggttgccattgatctgcaccatgaacctgaccaatgccaccggagtgatccgcgagctgttcgaccttgacctggcagcgttcaatgcactggtcgccgaagcgccgattggcgccgagggcgtgagcatgctgccgtttctcaacggcgaacgcgtgcccgccctgccccacgccaccggcagcctgcacggcctgaccatgaccaacctgacccgcgccaacctgtgccgcgccgtggtcgagggcactacgtttggcttgcgttatggcctggatttgttgcgccagaccggcctgcaaagcctgcgcattcgcctgatcggcggcggctcgaaaagcccggtgtggcggcagatagtcgccgatatcatgaacaccgaagtgatttgcaccgagcaaagcgaagccgcggccctgggcgcggcgatccaggcggcgtggagccagtccggcgaatcgctggccagcctgtgcgacaaatgcgtgagcgtcgacccggccagccgcacgctgccggtcgccgagcatgtgagcgcctatcaacacgcctacgagcgctatcagcagctcgtggcaaccctttaagagcgaacgattatgtatctggtgtgtggcgaagcgctgttcgattttttcagcgaagaagaagccagcgggcaggcttccaaggtcaattacaaggcgattgccggtggctcgcccttcaacgtcgcagtcggcttgcgccggctgggcattgaatccgctttgttcggcgggctgtccaccgatttccttgggcgccgcttgctgcaggtgctcaaggacgaaggcgtgaatgagcagttcctggtggagttcgccgcgccgaccaccctggccatggtggccgtgggcgccaatggctcgccgcaatacagttttcgtggcgaaggctgcgccgaccgccagttggaagttgcgcacctgcccgcactgggcaaggacgttcgcggcctgcatatcggctctttttcactggtggtgcagccgatcggcgataccctgctggaactggtcaagcgtgaaagcggcaagcgcctgatcagccttgaccccaacgtgcgcctcaatccgcagccggatatccagctgtggcgtgagcgcatcgccgagctggtcaagcatgccgacctgatcaaggtcagcgacgaagacctgcacctgctgtaccccaatcagtcgccgcaaagcgtggtgcaaggctggctgcagcaccgttgccaactggtatttctgacccgtggcggtgatggtgccaccgtgttcagccgccagcacggcacctggtctgcgcctgccgtgaaggtggtgatggccgacaccgtcggcgccggcgataccttccaggcggcgttgattgcctggctgaccgagcagaatctggactcggtggcgggcctgcaaaagctcacccgcgagcaaatcgacgccatgctcgggttcgccatccgtgctgccgcactgacctgcagcaagaccggccctgacctgccctaccgtcaacagctgggctgaacacccgctaaaaaaccactgtgccactacggcagcccgcgtaatacgtggcctgccgtatagagccatctgtcagaaagcgctgcccgatctcaaaaaccctactaaaccaaacgcaatgtataacgtttgataccagcagtagggcatctcaatgtttacacaacggtcagttggctatcgtgccgtattagctgccggcatcctttcaatgcactgcgtgcacccacctcaggcgcaagccgcctgcatgcttaacgcgggaccgggcgatgacaccttcgtctgcgacagtggcagcagtggcgcgggcctcaccgacctgctgggcaataaccgccttaccctgcccgcgggcggcaccgggacggtcaatggcaacgtgaccttcgggccgggcgccgacagtgcccaggtcgattcagggctgattaccggtgccgtgcagcaaggcaatggcattgacgacttcaaaatgagcggggggcagatccagtcgcttgcccagggcgatggccgcgatacgttcctgatgaccggcgggactattgtcggcgcgttcgaggacggcgacgttgcgcgccagaccgggggcaccatcggccgggtcgacatgaagctcgacaacaatatctatgccatgtctggcggcacgattctgggcaacctggtgaccgccttcggcaccgacaccatcatcctctccggcggcacagtgggcggcaatatcagcgtcagcgggggcaatgacagcattactgtcagtggcggcaccctcaagggcgaactccgcgccagtgcgggcgatgacacgttcaattggctgggcggcggccagatcaggtcggcggtgttgatgggcgacggtgacgacaccgcgttgctgcgcggcctcagtgaaagcctgctcgccgccacgccctccatcgacggcggcctgggccgtgaccaactgaccttcgacaacaccctttcaagtaacgcggcccgttacgtcggttgggaaacggtcgacctcaataacgcctcgcgctttaacctggccggggattttttcctcggtgacagtgcgtcgaataccggcgcaatcaatatcgacagcagcagcgcactggcggtaacccagggcagcattcgcccctacaccgcaggccagctggcgacactgaacaacgcggggacggtcgacatgaccacgggcagcaacagcgccaccgacaggctcacggtgtatggcaactacgtgggcaacaacggccagctcctgttgcagaccgtgctcggtgacgactcatctgccagtgacaagctggtggtggccgacggcaccctcagtggccatacccgattggccgtgacaaacctgggtggtgcgggcggcttcaccgccaacaacggcattgaagtggtgcaggcgctcaatggcgccgtcagcagcaacgatgcctttgccttgaaaggttcggtatctgccggggcgtatgagtatttgctgttcaagggcggcgtcagcgccggcactgaaaacaactggtacctgcgttcatccgtggttgccgtgcagccaccggcggtgccgccggtgacgcctgcgccccccgtggtggtgcccgtgccgccgctgccggtcacgccaccagtggtggctgccgacgagccgcccgtcgagccacccacggcgcaaccggtggcccctgccgagacgcctgccccgcccgccagtccggtcgccgccgccgcttcaccgcagtccgccgcgagcaaccccgtattaccgagcgctgttgccggggcggcgccgattccgttgtaccgcctggaggtaccggtgtattcggtcgtcgtgccggctgcacaactgatgacgttgcaagcgctgggcacctttcacgaccgccagggcgagcagagcctgttgactgaaaccggggcggcacccgccggctggggccgcgcgtatggcagcgatttcaacaagcgctgggcaggtacggctgcgccaagcgttgacggtacagtcaaaggctatcaggtcggccatgacctctacgcgtccgaaaccagcggcggccagattcaacggtttgggttattcgtcggccaaagccgcctgcaaggtgacgtaaaaggctttgccgaaggcttccaggaccgccgcgccggccgcgtcaaactcgacggcgatcacttcggcgcctattggaccctgactgaccctgttggctggtacgttgacctggtggccatgggtacccgcctcgatggcaagaacaaatccgatcggggcgtgaacatggataccaaaggccatgccttggcagtgtccggcgaagccggctacccgatgactgtttccgaacactgggtggtggagccgcaagtacaggtgatccgccagacaatcgacctggatagccaggacgacggtatttccagggtcgacttcgactcccaggactactggaccggccggctcggtgcgcgtttgaagggccgttatctgctgaacaacacgcccgtggagccgtacctgcgggccaatgcctggcgcacattcggcggcagcgacacggtgacttacgagggcgtcgaccgaatcaaaaccgatcacacgtcatcgtcggcggattttggtgtgggcgttgtcgcccggctgtcatcggcggtgagtgtgtacctggcggcggattacaccaccaatctggacggcaacgcgcttgagggcgtcagcggcaatgctggtgtgagaatgagctggtaaagatgaaggttttgtcagcctgggcaaaattaatccacggttaatcccccgggccgactgtgaaggtgaccgcactcaccgcccccgggggcccgtgcggccgccggcccatcatgttgatgtgcccgcgaacgatttgcggagaaccatcatgaaactgcgtactttactgttcaccggcacgctggccctggctgcggtatccggcatggcccaggccgacacacaacaagcggcgaccaaaccggtgccttatcagtacggcatgcccttgaacatcgacaaggtcattgccatgaacgaaacccaaaccaatgattgcaaagtcatcaacgcggacatcaagttcatcgacaaggcaggcaaagtcgaagacgtgggttatcggaaaatgtccgaagcgtgcgacttccagaattgacgcgtcccttgcagtcgaaatttgtaggatttttccgaaaaaacccaatttaatcaatgattaaggtctcgggttaacagtggtcaagaccgcgcttataccttcaccggtccagggcgcggccaccggctcatcacttcgatgcgccgtaccactgacggagaatcaccatgaaacagcacctcctgctgatccttggcaccacgctgacactgttcgatgtcgcgggtatcgctagagccgacgccaagcccgagccgtattactacggtatgccgctggatatccgcaaagtgatctctatgtacgaacccaaacccaatgaatgcaaagtcattactgcgaccatgaggtacgtggacaaagccggtgatgtgaagaacatgagctatcgcaaaatgtccgaagcctgcctgttccagaactgaaccgacggtcataaagggcggcgtatttgctggtatccttgcgcgcacgttacttggctgaagggattcatcatgccgattcgtttttatacgctcgccctctttaccgctttgctgtgctttgcccttgcactgatctggggattgcgctcggacctgttgctgtggctgtggagtgttgaatactccagtactaccgggctggtatcgcgtcgtaacgccgcgctgttcctggccttgggcatcatgttttatcgcgcccgccatgcgccacccagcgaaacacgccgcgccttgaccaccggctttgcgaccggttgcctggtattggcaatgctggggttcggtgaatggatcgatggcaatgcagggcccggaattctgctggcggtggcaacagaaaccgcactgggcctggcgtttatccaggcccacaggtcgtcggtgactcaacctcaggcatccgcctagtaataggcgcgcccgcccgctctttgcagaacaggtgaatgggtatgcttgaggtcttcgcgcaacccggtgatcaggttgcaaatggctcgactgctgtcgagtttgtcggcgttgatacctttgacttccaaatccacgcggtcacggtcgcggtcgtcatagaccttgatcgtcagcgaggcatcttcggctttggtgcattcgcaccgtttgggcaggaaacttccttcaatgatgctgcgaagctctaattccgaaagcatggccaacctctcctttttatgagactgccaacagatttttgtgtgtccggcaggcgcatgcctgccacgtcttgccgaccctggaagacgctttcattcaccagcctactcggcaaaatccactctcgttgtaacctttcctcataagcgacgcactccgttatataacgtgcgccgaggcgtgttcacagcgtttgaatcgtcgtcgaactgcgacgattaaacgtttaaccccggcccttgcgctaaacggcaccgtatgcggccgctctttcagcaacatgtcgcaaactatcgaagttgatgttggcccctgaattgatcgccacaagggtgtggttgcgcacgccggtgtacgccacatacttgcggattcccgccaccgccaacgcgccggaaggctcggtgatggagcgcgtgtcgtcataaatcagcttcatggcgctgcacagttcatcgttgctgaccgtgatgacctcatccacccatgccttgcagatctcaaacccgcaagcgccgacctgcgccacagccgtgccgtcggcaaacccgtcgacactcggcaataccacgcgctcgcctgcgcgcagggcggccagcaggcaactggagccctcgggttccacgccgatgatgcgcacgtccgggcgcaggtatttgacataggcggcgattcccgcgatcaggccgccgccgcccaccggcacgaagatggcgtccagcgggccttgttgctgacgcagcacctccatggccacggtgccctggcccgcaatcacgtcggggtcatcaaaaggcgacacgaacgtgcagcctgaggtcgccgccaactgcaacgcatgggccagcgcaaacggaaaactctgcccgtgcaacaccgcttcggcgccccgcgaccgcacgcccagcaccttcaattgcggcgtcgtgcaaggcatgacgatctgcgccttgatccccaactcccgcgccgccagtgcaacgccctgggcgtggttacccgcagatgccgtgaccacgcccagtgccctctgcccggccgtgagttgcaccagcttgttgtaggccccgcgaatcttgaaggaaaaggtcggttgcaggtcttcgcgcttgagcaagatcgagttgcccagcatcgccgacaaggccggggccgcgtgcaagggcgtgcgcaccgccaggtcatagacgggcgctgcgagaatcttcttcacgtaatgctcaagcaaccccggatcggcggtcggtgggacggggcaagtgctcatcggtgtctcctggcttgtgtaaaaaggccctgagacggaaaaaaacccgcctcaagggcgggtttgggtgcagccgtgtgctatcccgccaaatgaggaatggcggtaataatcatgctcggctggctgcggaaggctgaaaatttcatgccctgaaattaaccggggcctgccaggcaagtcaatggccagacgccatttagccgatgagggtttacggtcgatatacgaaacgtatacgcttcgtgtattacttcagcacagtgaacctcatgggcatcgtcaaaatcaccgaccaattgcacgaacaactccgcctggccagcgccgccatggaccgctcgatcaacgcccaggccgagttctggatcaagatcggcctgctggctgaactgaaccccaacctgccctacaacgacctgatcaacaaactgttgctggacaaacccgacctgatccgggggcgcgagtgatgatcaagaccgccgcacaactcgccgtgatgcgtgaatccgggcgcctgctggccagggtgttcacgatgctcgacagttttgtcgccgccggccgctccaccctggagctggacagtgccgtcgaagctttcatccgcaatgatttgaacgcccgcccggccagcctcgggcaatacgactaccccttctgcatcaacacgtcgatcaacgaggtggtgtgccacggcatgcccagcgccaaggaaatcctcaaggacggcgacatcatcaacatcgacatcaccctggaaaaaggcggctatattgccgactccagcaagatgtacatgatcggcaacgtggcgcccaaggcccagcgcctggtggaaaaaaccttcgaggccatgtgggccggcattcgcatggtcaagcccggtgcgcgtttgggcgatatcgggcatgcgatccagagccacgcgcaagcgaacggctacagcgtggtgcgcgaatattgcggccatggcattgggcgggaaatgcatgaggaaccgcaaattctgcacttcggacggcccggcaccgggatggagctgcgcgaagggatggtgtttaccgttgagcccatgctcaatcagggcagctcgaaagtgcgcagcctgaaggatggctggacggtggtgaccaaggacaacagcctgtcggcgcagtgggagcacaccgtggcggtgactgcggatggctttgaagtgctgaccctgcaaccggccacctgaacaacccattatcctgtgggagctggcttgctgtggtgagggagcttgctcccgctcgaacgcgtagcggtcgccagcttttgggggcgcttcgcaccccagcgcaagcaagcttgctcgccacagtaagccagctcccacagttgatcagtgttcacatgacgttcgcgccgccggctattcgtttgagccccaagaccatcaacccggcccccgcccccatcgccagcagaaacaacgggtacgacacccaccacggcgtccctgccgtcatcatgctgaactccgacatgccgcctacactggcaatcaggttaagcggcagaaacaccacgttgatcagcgtcagcttgcgcagcaaattgttcatgctgttgttcatcaaatttccgcgcgcatcgatcaacccggaaaatacgttggaatagatctccgcctgcttgtagcactggtggttctcgatgatcaggtcatcgatgagccccagaatctcggcactgaaatgctccttctcgccatggttacgcagccgcgccaacaccgcgccgttactgtgcagcgcgttgatgtaatagatcaggctttcactgaggctgaacatctgcatcaaatggtggttgctcatggacgcgttgaactgctgctgcaactcccgtgcgaccagcttgatcaccttgaggtggcccaggtagtgatggatgttgttgagcagcaggtcgagcaacacatccagcggcgtgtgcagcggccggcgcgcgccgagcccggacagcggggtctcatcggtggcgatcaccaacaggcggccgggcgaaaacaacaggccgcaggacgacacttcgaacaccaggttgccgccgccggaatagttctccgggcgtttccagatcagaaacaggttgtcggggtgaaactcgatgcgcgagacctcatccgggtcgagcgccgaggccagggcgtgttcgtccagtttgtgatggtcgcgcagccattcgcgctccgcgaggtcggggttgctgaccagcatgatcggtaccgcgtcgccctccccgccgtgcaatttgccgccgctcaattcaaagcgctggatcatcgcgcgtcaccacacctggccttggcgcttgagctccaggcgcctcacgaattcttccagcaccagtgcgtagaggtcgtcctgcaagtaggcgtcttcgatgcccgcgtccatgttcgggttgtcgttgacttcgatcaccaccaccttgtcgccggactgtttgaggtccacgccgtagaggccgtcaccgatcaggttggcggttttcaccgcgagttccaccaccgccttgggcgcttcgtggaccgccagggtgcggcattcgccgttgatgtcctggccgatggccttgtggttgtagatctgccaatggcccttggacatgaagtattggcaggcgaagatcggcttgcggttgagcacgccaatgcgccagtcgtattcggtgtagaaaaactcttgggccagcaacagcaccgaatgttcgaacagctcggcggtggccttgagcagtgctgcctggctttccaccttgatcacgccccgggagaaacagccatcggggatcttcaacaccagcgggaagccgagacgctcgccgacccgctcaaaatcttccggtcgttccttgtacaaaatttcggtggcaggcatgcccagttggtggctgttgagcaggtcggtgagatagaccttattggtgcagcgcaggatcgacgcagggtcatccatcaccaccaggccttcgctttcggctttctttgcgaagcggtaggtgtggttgtcgacgctggtggtctcgcggatcaacagggcgtcgtactcggcgaggcgcgagtaatccttgcgctcaatcagctctacatcgatgcccaaccccttgccgacccgcacgaagttttccagggccttggcattggagggcggcaattgctcctgggggtcgtggaggattgccaggtcataacgggccaggcggcgtgagcgcggctggcgccagatcttgcggctgaagttgtcgagggcgtgggcgaactgatcttcctgatcatcgcgcaacttgtgcagcacgccggacttgaccccttcgatgtgccagccgttattcttgcgaaactcaactaacaaaatcggacacggaaaggtttcaaacaactgccaggccaactcttgtaacggctcgatattggtgcggccaaagtaaagtgtcagggtgaagccttcggtattgctgtaaagatgatgactcaaggctttatcaagggttttatccaggtcatccagggataagccgtacagggactttttcgtcaattcgctgatggtgcgcaccgagggaatcaccttgtgcccccgcgcttcggccagcagcgaacagtagtaaccatgccccaggtacttgtagctgcggcacaggttgatcacctgcacccgcttgcccgtctcgctttcacgcgtctgctcgaggtattcctgggcggtgacgatgtcttcgctgggaaagtaagaggcccagtcttccttgcgctcgacaataatcacgacttgactggaaccgcgtggcggggaagaaaaataaccatgggaagttattgtcgccgcgacagtttgctcggatacttcacgccaatgaccttgtaccgccgacataatatttgatccgctttagagaactcgaccttttctattaagcacgatcttttagagaagtcccgtttcgttacgcaacttttacggcggtcccatggctctttcctttcgcgttgcaaccccccgtgacgtgcccgaattggtggcactggaacagcattgtttcaccaccgaccggctctcgccccgcagctttcaatggatggtcagccgcgcccacggccagttgctggtagcagagcaagacggccatttgctcggctacgcgctggtgctgttccaccgcggaacttcgctggcacgcctgtattccatcgccatcgccgaacaggcgcgcggcctgggcctgggcaaacagttgctggcgcgcatcgaggcctgcgccatcgaacacgattgcgcctacctgcgcctggaagtgcgcaccgacaaccccggcgccctggccctgtatgagcgcacgggctactggcgctttgcgctgatcaacgattattacgaagaccacaccgccgccctgcgcctggaaaaacgcatcgtccagcatcaggacgcgcgcccgcaaagcgtgccctattaccagcaaaccaccgacttcacctgcggcgccgcctgcctgctgatggccatgggcgcgctggtgcccgagcgcgttgcgcaacgccgtgaagagctgcagatctggcgcgaagcaaccaccgtgttcatgaccgccggccatggcggttgcagcccgcaagggttagcgctggcggcgtggcgccggggctttcgcgtgcgcatgcaggtaaatgtgcacgggccgttatttctcgatggcgtgcgcgacccacataaaaaggatgtcatgcgcctggtgcatgaagcgtttgaggaagagcttgccaccagcaacgtcgagcaggtattcggcggcgcgctggatttgccccaggtgttgcgcgagggcgggcaggcgctggtgctgatcagcagctaccgcctcacccgctccaagtcgccgcattgggtgatggtcaccgattgcgacgacgacttcgtctacctgcacgacccggatgtggaccacagccagcaccgccagcccctggactgccagcacctgccggtcagccatggggaattcgagcggatgtgccggttcggcaacaacaaattgcgtgctgccgtggtgctgtttatgccacttgcttgatgcctgccttggcttccagcgcgcgcaccagcggcaacacgcgctggccgaagtactcgacttcttcctggaagtgcaggaacccggccagtaccaagtccacgcccaccgccttgagcgcgacgatgcgttcggctatctgttgcggggtgccgatcaggtttgtcttgaagccgtcgttgtattgcaccaggtcctcaaagctggatttggcccagttgccctcgccttccggtgacgacttgcccgcctgcttggcggcgtcgccaaatgcgttcacggcctccgggtcggccttgtcgatgatctcggcgagtacggcgcgggcttcttcctcggtgtcgcgggcgatcacaaaggcattcacgccgactttgaccgaatggttattcgccgccgccttggcgcaaatgtcatccacctgggccttgatgccttcgggcgtgttgccgttggtgaagtaccagtccgacacgcgagcggccatatcccgcgctgcgcgtgagctgccgccctggaacacttccggctggctcagcggtttgggtttgagggtgtagttgttgaagcggtagaagtcgcccttgaaggtgaagtcgtccgtggtccagatgcctttgagggcgcggatgaactcctcggagcggcgatagcgctcatcgtgttccagccagggttcgccgatggcctggaattcgcctttgaaccagccactgacaatgtttaccgcgatgcggccgttggtgagctggtcaatggtcgccagttgcttggccgccaatgcgggttgccaagggcccggcaggatcgccgcaatcaccttgagcgtggtggtggctgccagcaaggcatggctgaacgccacggattcgtgctggttttccgcaccgtaaccggcggtgaagcgaatttgcgtgaggccgtattcaaagccggcggcttcggccaattgcgccagtttgcggttgtagtcgatgccccagtgggtgcgctgctcgatcttgctgaccaccagcccaccgctgacgttgggcacccaataggcaaatttcacggcttgctgactcatctggcagtacctcgcacacagggatgtatcaaaggcttgagcagcaagcgtgccagccctcccaagaagcccgccgtacaggcgctgcgagataaaaaccagcgttaatgggccaggccggcaatgtcatggatcgcgttgatttgtcgatctgctgttgctggagcaacaccccacggcgagcccctgccgcaaacacaggccgcccgccccggcacggactgtgcaaccacccccaggacttgattactgccaaggagccgcccccatgaccgagcaacacgtcatcaacccgctgtctaccggcgtggattaccctacgctggccacacgtttccggccgatcttccaacgcatcgccgagggtgccgtggcgcgcgaacacacccgcgccctgccccatgagcccattgagtggctgaaacaggccggtttcggcgcggtgcgcgtgcccgtggaatatggcggcggcggggcttcgttgccgcagttgtttgaactgttgatcgaactggccgccgccgattccaacgtgccgcaagcgctgcgggggcatttcgcgtttgcagaggaccgccttaacgcaccgccgggcgccgggcgcgacctctggttcaagcgctttgtcgagggcgatatcgtcggctgtgcctggactgaaatcggcaatgtcgccattggcgatgtcgtcacccaggtcagccccgacggcgaccaatggacactcaatggcgaaaagttctacagcaccggcagcctgttctcggactggattgacgtgtacgcccaacgcagcgacaccggcggcgatgtcatcgccgccacccgcacgcgccagcccggcgtggtgcagagtgacgattgggacggcttcggccagcgcaccacgggcagcggcaccacgcgctttaccagtgccgtggtagaggccgaaaacgtgatcgacttctctacccgcttcaaataccagacggcgttctaccagttgatcctgttagccaccctggccgggatcggccgcgccgcgctgaacgatgtggcccatcaggtgcgcagccgcaagcgcatctacagccatggcaacgcggcgcatgtcagccaggattcgcaggttcagcaagtcgtgggtgaagtggccgccctggtgtacgccgccgaggccagcgcgttgaaagccgcagtgccggcgcaacgggcgtatctggcgcggtttggtggcgatgagggggtggagcgcgaggccaatgtggccgccgaaattgagtcagcgacggcgcaggtggtggtctcggagctgatccaacgggcgaccagcgaactgtttaacgccctgggcgcttcggatgtgcgtcagggcaaggcgctggatcggcattggcgcaatgcgcgcacggtgtcctcgcacaacccggtgatctacaaggcgcggattgtgggggattgggtggtcaatggcaccgagccgccgtttgtgtggcagatcggcaatggcccggccaggacttgaagtcaacacaacccctgtgggagctggcttgcctgcgatagcggtctgtcagcttgcatttctggtgctgggctaccgccatcgcaggcaagccagctcccacatttggattgcgtacaccctgcaatttagaaggcgagtttgtagccgatggtcatcaacatgatcgccaggcacgggcgcagcacgccgtccgggactttgccggtcatgtggctgcccaggtaaatgcccggcagcgaacccatcagcaaaaagcccagcaggtgccagtccatattgcccatgctcgcatggcccaggcctgccaccagcgtcagcggtacggcatgggcaatctcggtgccgaccagacgccgcgtggccaggaagggatacaggatgaacaacgccacggtgcccagtgcgccagcgccgatggaggtcaacgccaccatggtgccgaggatggcaccggtcaccactgtcagcgcattcaggttgcgcgggctcatgtggtagtcatcgcccgcatgacgctgggcgaacgccaacaggcttttcttgaacaggatggccaaggcggtcagcagcaacaccacgcccagcgcctgcttgatcaccgcgttcatggcgctggggtcagtgtgcaggctggcgaggaaccacagcgtcagcagcacggcgggcacgctgcccagggtgagccagccggtgatggtccagtcgatgttcttgttcttgctgtgtaccagcaccccaccggacttggtaatggccgcgtacaacaggtcggtgcccacggcggtggccgggttgatgccgaaccagagcagaatcggcgtcatcagcgaccccccgccgaccccagtcatgcccacgataaaaccaacgatcaggccagcgactacaaaaccaacattacccacatccattacaactacctgcggccttataaatttctggccgcaggatagcgatttttcttataacgacttataccaatatgatctgactttatgccttttagctcagccgccggcagacgtacgcctgggtctggtacgggaaggccacggtgtcccgccctttcaaggccgggtgggtgtcaatcaatgcctgtagctgcgcggtgaccctggctttttcatcggggcccagcgcggcgataaagctgaccgagaggaaccggtccatgatcacttcctgcgggctgccgacgtggctgtattgaaaacacgccatttcgggcgcggaaaaatacttaccggtgaacgcttcgcgccaacggccggtatgaaagcgcggcgtgtcaccctcgtacggggtgatgatgccagtaatcgccgcgacccaatccaccgattcatcccgcacattccatatcagccccagtcgcccgcccggcttgagcacacggtgaatttccgccagcgcggcctcggtggaaaaccagtggaacgcttgcgcgcacaccagcgcatcggcgctggcggattcaagcgggatggactcggccgtgccagcgagcaggcgcacatccggcagcagttttgccaactgcgcacccatcgcttgcaccggctcgacggcaatcagcgtcggcgccagggtgctgagcaaccgggtgaatttgccggtaccggcgcccaaatcgatcaccgtggagtgcgcgtcgatgtgcagcgtgtcggccagccagccggtgagttgtcgcggatagtccgggcggccttgggcgtaggtgacggcctgggtcgagaaaccttgttgagcagacgtgtgaacaccagtcattgccaatctctcctcggttgttgcggggcgcacagtgtgcgccctccgcagtttattttctaacccgtgcatccaatcgtgcgcgtcgcgggtagtcctttcagttaccccgctgtttgactgaaatggagaaacacccatgaacgctaaaacactgctctgcctgaccgccctgctggccacccccgccgttttcgcccaggccggcttgccggacagcatcaaagtgccggacggccacaaaattgcgctggaaactaccggcgtcggcgaaatcacctacgagtgcaaagacaaagccaacgccgccggccagaccgaatggactttcgtcggccccaaggccgtgttgaatgaccgcagcggcaagcaggtgggcacctacttcggcccaccggccacctggcaagccaaggacggttcgaaaatcaccggcacccaattggccgtggcgccttccggtgcgggcaacctgccctatcaactggtcaaggccaacccggctgaaggcaagggcgcgatgagcggcgtgagttatatccagcgggtcgcccttaagggcggcgtggcgccgagcagcgaatgctcggcggcgaacaagggcaagcaggaagtggtcaagtaccaggccgactacatcttctgggcggccaactgagtaaagtcggctacgctgcctgtggcgagtgcgctcgccacaggatcgagccattaagggataccgtgtttgtttgattatgaagcgtgccttgcggcctgcgcccgtggcgataaacgtgccctgcgccaactctatgtgcaggacagccgtcagctgctcggcgtggccttgcgcatcgcccgggacaaagccctggccgaagacatcgtgcatgacgcgtttatcaaggtctggcatggcgccggcagtttcgacccaggccgtggctcggcgcgcggctgggtgttcagcgtgacccgccacctggcgctcaatgccgtgcgcaaccgctaccgcgaagtgacgctggaggatgaacacgagcaagtcgccgcgcccggtgccagcgttgaattcagcgcacgggaaggcaaggtgtatgcctgcctggaacacctcgacccggcccgtcgcgcgtgcatcctgcacgcctatgtggacggttgttcccacagcgaaatcgcccggaaactggacacgcccctgggcaccgtcaaagcctggatcaaacgtagcctcgccgcgctgcgggagtgcatggcatgaacgagccgatcgatgaactggccagcgaatacgtgctgggcaccctgcccgctgagcaacgggccgaggtggaacaacgcctgaaacacgaccccgaattgcgcgccgccgtggatgcctgggaacagcgcctgctgccgctgacggcattggctgaaccggtaccgcccagcgctcaactctggcggcgcattgaacgcaccgttaaaaaccccgacgaagctgtggcatggtggaacctgctggcactgtggcgcgggttggccggcgccggtgtgttgacctcgctggtgttggcggcgctgttgctgactcgcccgcccgcaacgcaacccagctttgtggtggtgctggtcgcgccccaaagccaggcaccgggctgggtgatccaggcgagcaatgaccaacagatccagctgattccactgggggtgatgcaagtgccgagcgacaaggccctgcaattctggaccaagggcgacggctggcaaggcccggtctcgctgggcctggtcgagccggggcaaaccctgtcagtgccgctggacaagctgccgccgctgacacaaaaccagctgtttgagctgaccctggaagacccgcgcggctcgccgacgggcaagcctaccgggccgatccaggccatcggccgggcggtgaaggtgctgtgatcaaccgacgctgggcaaccacagccggaaccgcgcgccgcccaatggcgaggccagcgccgtcaggctgccgccctgggcctccactgcgcggcggctgatcgccaggcccaggccgaagccaccggtggcgcggtcgcggctgcggtcgaggcggtaaaacggttcgaaaatgcgctcacgctggtccagcggaatgccgatgccatcgtcgtccacccggatctcgcagccttcggcgcacaccttgacccccacctgaatgcgcttgtcgcaataacgcgtggcgttgcgcaacaggttttgcaaggcgcgcgcggtcaggcgcgggtcgaggctgaagcgctccacggcgcagtcgagcgccacgtcaatcacgatgtcggggttttccagttcgtcgtccacactgccgagcacactgtcgatgaactcgtcgagcaccacctccacccgctcgggcaattgcgccgggttttgcaggcggctgtaggacagcaattccagcaccagttcatccagctcgcggatatgcgccaccaggctttgcaggcgctcacggccagccggcggcaggtcttcggacaaggccagcgccaggccgaaatccagacgggtcagcggtgtacgcagttcgtgggacaccgcgttgagcaggtcgcgctgctggttgagcaggctttcgatatcaccggccatggtgtcgaacaccgacgccaggctgccgatgttggagctgggcggaatgcgcgtgcgttcgctcaagttgcccttgcccagttgcgcggcggtgcttttcaagcgttccaggtcacgccagtgcgggcgcagccagatcaacaggcacgcaagcagcgccgccacgatcagcacgttgatcgcccaatacagcacgttcatgtccatcgggtcgggcggcagtgtcaacttgaccacaaactgctcgttgatcggcgagctgatttcctccatccagccccattcgccgaggcgcaccacggacttgccctgctccagccgttgttcttcggcgggcgtgtagctggcgtcctggcgcagcagcagttgtaccttcagcggtgcaaagtcgcggcccagttgctcggtgacctgcgaccagcgctccaccggcgcgcgctggtactgcttgacgatcagcttttgctggccgcgcgtttgctcgatgttgtaatccatgtagcggtgttcaaagaccagaatcaccagcttgggaatcaggtaaatcgccgcgctgtaagtgacgatggtgatcagataaaggcgtagcagtacacgaaacatggatcagcattcccactcggaacggctgaacaggtagcctttgccccacacggtcttgatcttgcgcgcctcgcccgcgtggtcgtcgaacttgcggcgcagcttggagatggccacgtccaccgaacggtcggtgccgttgaattcgatgccgcgcaggcgttgcaggatctggtcgcggctgagcacttcaccggcatgccgggccagcaccaccagcaggttgtattcaccactggacagctccaccgcctgttcgcgccaggtcacggtgcgttccgacaggtcgatgcacaggttgcccatcacgatctggtcgttggccacctggggttcggacaggctgctgcggcgcagcaaggtgcgcacccgcgccagcagcacgcgcggctcgcagggtttggtgacatagtcgtcggcgcccatctcaaggcccagcacctgatcgtggctgtcgtcgcgggcggtgagcatcagaatcggcaggcccgccgagtcggcgcgcaacaggcggcacacttgcaggccgtcgaggccgggcagcatcaggtcaaggatcaccaggtccggcgggttgagccgtgcgcgttcgcgcacatggtcgccacggctgagcacgctgacatggtagccattgcgttccaggtagctggcaatcagctcggagagtgcggcgtcgtcttccaccaggaggatgttgggcatggtgtttccagataatacggtttatcggttttacgcagacccactgtggggagcgggcttgtgtgggagctggcttgcctgcgatgccagcaactcgatacatcaggcgtactgagtcgatgctatcgcaggcaagccagctcccacataagagcctgacttccacatttgatctttgttgtttgcaggattgtgcaaggatatacgccctcggccgactatgcgccgcaccttacatttcttcacagacgagctacacagcttcacagcaccacggcgcaggtgtctttaggatgcgccagtcaatattgggatatgagcatgtcgaagaatctgtttgcgccgttttgcctgctggccctgacgctcgccctgagcgcgtgcggcaagtcggccgagcaagcgccggaaatgcccttggccaaggtccgcatcgaaaccttgcaggccaagcccctgtccatcaccagcgaactgagcgggcggattgccgcgccgcgcattgccgaagtgcgtgcgcgggtggccggcgtggtgatgcaacgggtattcaaggaaggccacgacgtcaaacaaggcgacgtgctgtttcgcatcgacccggccccgttcaaggccgacctcgacagcgcccaggccaacctgagcaaggccgaagccaacgcgttccaggcgcgcctgcaagagcagcgctatagccaactggtagaaggcaacgccatcagcggccaggaatacgacaacgcccgcgcgaacctgcgccagaccaacgccgaagtcgctgccaacaaggccgccgttgagcgcgccaaactgaacctgggttacgccaccgtgaccgcgccgatttccgggcgcattggccgtgcgttggtcaccgaaggcgcgctggtgggccagaacgaagccacgccgctggcaatcatccagcaactggacccgatccacgccgacctgacccagtccacccgtgaactgaatgacctgcgccgcgccttccgtgcgggcagcttgaagcaggtcggccaggaccaggccaaggccacgctgatcgaggacgacggcagcctgtacccgctgccgggcaagttactgttcgccgaaatcagcgtcgacccgggcaccgggcaaatcattctgcgcagcgaattccccaacccggacctcgacctgctgcccggcagctttgtgcgcgtgcgcctggagcaagccgtcgacaaacaaggcctgagcgtgccgcaacgcgccatcactcgtgacagcgccggtattccaatggtgttgctgctggacgccgagcaagtcgtcagtcagcagccggtcgagctgggcgcagtgatcgacgaccgctggatcgtcagcagcggcctcaaggctggcgaccgcatcgtggtcgaaggcctgcaacacgcgcgccccggtgaaaaagtccaggtggacgacagcccagcctcgggccagccagtcaaggaataacccgccatgccgcagttctttattgaccgcccgattttcgcctgggtggtcgccctgtttatcctgctggccggcgcactggccatcccgcagttgccggtggcgcagtaccccaacgtcgcgccgccgaacgtggaaatctacgcggtgtacccgggtgcctcggcccagaccctggatgaaagcgtggtcagcctgatcgagcaggagctcaacggcgccgaccacctgttgtatttcgaatcccagagcagtttgggttcggccaccatcaccgccacgttccagccgggcaccgacccggaaatggctcaggttgacgtgcaaaaccgcctcaaagcggtcgagccgcgcctgccgcaggcggtgacccagcaaggcttgcaggtagaaaaagtctccgccggtttcttgctgctggtcacactgacctcaagcgacggcaagctcgacgacgtggcgctcagcgattacctggcgcgcaacgtgatgaacgaactcaagcgcctggacggtgtgggcaaggcgcagctgtatggtgcagaacgcgccatgcgcatctggatcgacccgcagaagctgattggtttcaacctcaccccggccgacgtgaatgccgcaatcagcgcgcaaaacgcccaagtgtcggcgggcagtattggcgatttgccgggcaccaagacccaggaaatcaccgccgcgattctggtcaaaggccagctctcgaccccggcggagtttgccgacatcgtgctcaaggccaacccggacggctccaccgtgcgcgtcggcgacgtggcgcgcgttgaaattggcagccaggaataccagttctccacgcgcctgaacggcaaaccgtccaccgccgtcagcgtgcagctgtcgcccggcgccaacgcgctgagcaccgcgacgctggtgcgggcgaagatggatgagctgtcgcgctacttcccggccaatgtggaatacaagatcccgtacgacacgtcgccgttcgtcaaagtctcgatcaccaaggtggtgtacaccttgctggaggccatggcgctggtgtttgcggtgatgtttctgttcctgcagaacgtgcgctatacgctgatcccgacgctagtggtgccggtggcgctgatgggcaccttcgcgaccatgttgctgctgggtttttcgatcaacgtgctgaccatgttcggcatggtgctggccatcggtattctggtggacgacgcgattgtggtggtggagaacgtcgagcgcatcatggccaccgagggcctgtcgcccaaagacgccacgcgcaaggcgatgggccagatcaccggagccatcgtcggtatcacgctggtgctggtggcggtgttcctgccgatggcgttcatgccgggttcagtgggggtgatctaccagcaattctcgctgtcgatggccacttcgattctgttctcggcgttcctcgccctgaccttgaccccggcgctgtgtgcgaccttgctcaagccgatcgccaagggcgaacaccatgccaagggcggtttctttggctggttcaacaaacgctttgatcagttcaccaaccgctacgaaggctgggtggcttacgcgctcaagcgcagtggccgctacctgttgatctatctggtgttgctggtgggcctgggctggatgttcagccgcctgccctcctcgttcctgccggtggaagaccagggttacaccatcaccgacatccagctgccgccgggcgcaagcaagaaccgcacggtgcaggtggccgagcagatcgaggcgcacaacgccggtgaaccgggagtgggcgataccaccatgatcatgggcttcagtttctcgggttcggggcagaacgcggcgctggcgtttaccacgctcaaggactggtccgaacgcagcagcaaggattcggcctcggcgattgccgaccgggcgaacgcggctttcagcgaacttaaagacgcgattgcctacgcgatcctgccgccgccggtggacggcctcggcacctccagcggtttcgaattccgcttgcaggaccgtggcggcgtcggccatgcggccttgatggcggcgcgtaccgagctgctggcaaacgccgagaagagcccgatcctggccaacgtgcgcgaaagcgccctggccgaagcgccgcaagtgcagttggaagtggaccgcaagcaagccaacgcactcggcgtttcgtttgccgacgtcggcaatgtgctgtcttcggcgattggctcggcgtacgtcaacgacttccccaaccagggccgcatgcagcgcgtggtggtgcaggccgaaggcgaccagcgcagccaggtggcggacttgctgaagatcaacgtacgcaacaacgccgggaagatggtgccgttgtcggcgtttgtcgaagccaaatggacccagggcccggcgcagttgacgcgctataacggctaccccgccatcgccatcagcggcgaagcggcgccggggcacagcacgggcgaggcgatggaggagatccagcgcctggtcagccagttgccggcgggcctgggccaggaatggaccggtctgtcgttgcaggagcgcttgtctggctcccaggcgccattgttgctggggttgtcgctgctgatcgtgttcctgtgcctggcggcgttgtatgaaagctggtcgatcccgacctcggtgttgctggtagtgccgctgggtgtgcttggcgccgtattggcggtggccttgcgaggcatgcccaacgacgtgttcttcaaggtcggcctgatcaccatcatcggtttgtcggcaaagaacgcgatcctgatcatcgagttcgccaaggacctgtatgagcaaggtgaagacctgatcgacgccaccctgaaagccgcacggctgcgcttgcggccgatcatcatgacctcgctggcgttcattctcggcgtggtgccgttggcaattgccaccggtgccagctcggcaagccagcaggcgatcggtaccggggtgattggcggtatgatcaccgccacgctggcggtggtgtttgtgccggtgttctttgtggtggtgatgaagctggtgcgcaaaaaacgctgagacctgagctgagcgggctgttgtggtgagcgggcttgccagaggaagctcatccgccacgaatgcgctatggtgctcacaacctcccttgttgtgagcacccatggccttcctcgcccgcacccaccctcgcctgtccgctgccgccgttctgggccttggcgtgggcatcctggcaccggcagacacactcctgagcaaaatcctcattggctggaatgccggggtctggacgtatttgctgctgatgctgtggctgaccagccgctcccgcgccgacgacgttaaacgcatcgccgaaatcgaagatgagaacgccgggctggtgctgttcatggtgtgtatcgcggccatcgcaagcctggcgaccatcaccctgaacctggtgggcaccaaggacctggacagcacggcgcgcctgatccattacggcttcaccgggttgaccgtggtcggctcctggttgctgatcggggtgattttcagcgtgcactacgcccgcctgttttacacctgggacggcgacgaacccgccttgcgctttgccgaggagctgcgaactcccaattactgggactttttgtacttctcgttcaccatcggtgtagccgtgcaaacagcggatgtgggcgttgccacccgggcaatgcgcaaggtggtgctggggcaatcgttgattggctttttgttcaacacggcaatcctggggttctcgatcaatattgccgccggcctgttcagttaggcacaaaaaaggggaagccgaagcttccccttgttcagatgcgtgaataccttagaaggcccactgcacaccgacagtgccactgtacggcgtgtcatacgccttgcctttgccatggctgagctcagcatgcaggctgaaggttgaggacagcgccaccgccatacccaccgtcccttcgatgctggcgcccgacaggttgtttttgaacttctggtcgttgatataaacgttgttgtccgggctgaaatcacgggccgccgcaacacgcacgaacggttggattttggcgccgctgtcgagctggatatcgttacccagcgtcacacccaccttgccgatggccgagagcgcgcggtcggtcttggccttcaggccattgtccatggtgtagttggagccaccaatcaccgcagtgtccagcttggcgaacggttcaatgtaagcgccttcatcgttgagcaccattttacggcccacttcaacccagccactgaccgcgtcctgcgtgtatttgcctttggcgcgctggccatcgctcatattgacctggctttggccgttcaagcggttgtacttggtacccacgtcgacatacacaccgctgtcgtcctgccagataccataaacaccggcgtagtaactgttgaccatcccgctgctgccacggctcaggcccaacttggagttgctgtagccgcccaacacgccaagcgtccactcttcactcaccgcattgtcgaaacccagcgcgaaaccgttctggttctgcgagtaaccgacgccattgctgttggccgccacgtcaatcttgttagcgtggccaagcatccagaagccttggctcttgccttcgccaaaacgcacttcgccctggcgcgtgcgcagtatccgcgattcaccgatcaacaccggcgcagcggcgttggccaatgccagtactgccttggcgctggtactggtgccttgtttttcggtatccaggtaccagtcagtgccttcctgcttgagaccatactcgaacgcgccgacatcgacggtatcgcccaccaggccgaatttggcaccgccactttcagtgtgcaccaccttgatcgcgtcaccggtggccaactccgagccactggcgccgatcagcagttggtggttgccttcggcgttgccattgacgttcaacaggtcggtctcaccggtgttgaagttggtgtgcatcttaaaggtgccgctgccggccaggctgttggtgttcagttgcagatactggcccggagcaccaaaggcaaccgagccacccgccatgcgcagcgcaccgacctggctgtcgccgaccagccgccactcgccgccggtgttggcatccagctgtttgacattgaacaactggccggtcagcacggcgttgttgttgagctgcaccgtgccggtgctgcctgcgccaatactcacgtcaccgaacaaggtgctgttgtcaacattcatgttggccgtggaattgttggcgacctgaagcaaaacaccattgccgctgagcagttgcgagccgttgagcacctggatgtcggcatgggtggtattggcaagcggcgggttcaccagaatggcggccccggttctgccctgcaccactgagttatccagaatcaaggaattggtacgcgtcaggttggcgtccgtacgcatgtttacgccgttgacaccaccgatgatccggctgttgtttctcgccgccgcatcggcgttttgcaataccaagcccatacccgtagcactggtggcctcgacacgggcattgtccagcgtcacggtgctgtagccggcagcattgatgccacgggtcgaacccaccacactgctgtcttttaccgtgacggatgaaccatcggtaccggtcgaagtgcgcgagacggccacaccaacgccgttggcattggtcacggtactgttattggtgattaatacactgctggcgcctgtggcaaaaatggcttgcgctatacccgggcgagccgtcacccgtgagcgatcaaccacgacagtcgattgccggcgggcactgatgtcctgcgcgacactgtttgcctgaagcgtcaggccggagttatccatttgaatctgtttggtggcggcaccggtagcagtcaggctcgcccccgcaaatatcgcgtagtcatccagtacggtcgaggaggagattgccgtgttgggcgccgtcacctgagtgattgcctgggcattgggtgaaatcagaaacaatagcgagactgcttgagccgttaatgcaatgctcaaaggtgttggtttgaaatcgaatactgccgacatattaatgaacctctagtgccttcacgaaacgatcaggaagggttctaaatctcgtgagaccccaccaatcaagcggcgccatcatcagttagcgcacaccacaaatctgtaggacttatcctaagtatcgatacgtaaattcagccaaccgtgaaatttttaacggatacatccgatgaagccaaagagggtcctacccctctttggctatcacactggcactctgatttatgtcggtatttccaaaccaccacagaagtacgacctgccattacctggccggtgccccctgacacgaatagtttcgtcaagcgagcttaccgtctgaccctggaacaccgtgctggttgacactaatgcagaacctgcactcagcaaggcacgattggcgttgaccgggttatacagttccagcgccgtacccaaatccacgataaaaccgagagtgctcgcatttccaggcggcaccttcaaattaaccgttaaggcgatgacactaggcggtgtagtggtattgttctggaacgcggtataccgcacggtgaaatccccacctggcaccaaataattggagccaggaataaacacctgcagtttgccgctattaacaggtctcaagctatcgcagttggcgattttatttggccctgccgtattctgtacaaccggtagttccattcgcatgatcgcagagtcgaccgtgacaaggtgggtaggtgtagtcgccgtgttaggattgtttaggctgctgacggtgtaactgaccggcacagttggaccgccgattgccaggatgtcaacaaacggaagaggaatgatgacctccccgttggcgggaatgctcgtcacatctgtcgaatacaagcggccgccgtagtccaccgtaattctgaacgggagctgatttacaggcaatacagccgttgtccacagcgggattctaaaccgtccatctctgttgatgtcacccacttccagatggttggcaggcccgaaggtattgccagggcgaaccgcctcgaccaccacgggacgcaggtctgtgatcaggtccggccctacacgggccaggttcagattgaatggcgtgctcaatggtggcgtcgggtaattggtgcccccgctattcaccgtgtaagtcgccgttaccggaacgttgccgggtcccgcgccatagagcgtcaccatgttggctgcggtgaactgaaactgaggaaacccggtagcgcctaccggcaacgtcagcggtattgaaccgttgatcgagttcagggtgaccgtaatcgaatctgtcgggcgtacagggtttgtgtaaggaggcaactgcacgagcaaaccgttgttagtatccacgtcggcttgatggatcaggccgtcagcctcagccaacaagaccaccaatggctgaaagccggttggcactggcgccgccccggtatacggcagcggtaaccagtatgactgcaaagagccgtttccaaccacgtcatatacgatataactgacgcgaaagtccccattcgttatagccgtgagtgcgctcaacggtactggaatttgggttggctgggcggggtcaagcggcacttttgtcactccgcctggaaagacgacagggctgccggaattcccgacaaaaaccgaaaccaaatcgccagggctgagcccgtccgctgcggtatacgcaaaatcaagcagcaatgtctgatttggcagggactggatataggcaagactaagcggtggcgttcccgctggcagtgtcggtgcgggtggtggaagcccgctatcctcaaagggggatttctcgtcaatgagcaccatcgccgcggttgtgaagttttcgacgaacgtgtctgcgacaaacaccttgcacctgtacaaccacaaaccatttggaaggtaagcttccgcaatgcgtatttcaacaggatcggtagcattgaagacaggcactgtaaaacttctgccactggtttcgaagaacagatcctctgcagcggcgtcaatgaaagaggtaagtgaccgatactcgcgaaactggaccgtcacaagatccggtttagtcgcatcggtactgaaagcatcccagcgaggcaaacgaagcaccgcttcttgactctttgcagcaggccgcgccagcaacccgggatagccgggaacttcaccgtcaaacttgccggcctcaagccgggtaggcgtatagcccgccggatcattcggcacgaatgcatccacaatttctctgttggttctgtccattatcttgctccgactagttacacaataagaataactacctgcttcgctgaccgaacacgctcacgccagccacgaacttttacactcctgacagaagaacggcgatgctctaaccggagcaccaaaagctcttcaaaaaaacattaatcactcacaaattattccgagcggcgtgcaataacacttactcgagtaattcagatcaacccgcacacgcccaggcaatgactcggcaactttcacaccccctcgccacacttcataagtgaaagtggccgaggcaaaattgcgcaggggaaacaacgtttgattaaatgattcaacattcaccactgcgcccgctgttacattcgtccgcccccaagtcaacgtttgtctgaatacaacgttcgcgttaggctccgcccagttattcttgtcaaacccttgccagccacacctgacttgatcattcacgcgtatttcgccatgggccgctattaaccagcgaacgccggtcattaccgttggggttgaactgcaggtcaggtagccatttcttaaactgtgctgtacctgaggtgccggcagcgtaataacgggagtcggtatcgtcgcgccaaggcttactgtaaacggcaggccgatactccatgtcgccatgaagttaccggtgtcgtcaaaaagcctgaagaaaatgtacgccgtgccatcgttcagcgtgcgaaaggcggcagcagccagtgacaccgttctgggcgtggtactgaaatccaccgccgaaattcctgacgccgggccaggcggtgtattgggcgagttggaaacaaagatctcgcactggtcaaagggtgcctcgatgttgtaggtcgggaggtagagcttcacctgtgggttggccagcaggtactgcgcgttgaccgcaggtaccggcggtacgacaaaccggagaacatcggttggccgcagcagcctgggagggtcgaaatcaagcagaagcgggatgctcggctgcatgctgttcgaaccgccctctgtctcgacggtgtaccacacctgcgcgatgcgcgttgcactgcgcaagtcagccagtttgattctgacctcgtaaaaagcctgagccgctggtgggggcgccgttactgggagtgtgtcgagcaacctttcgccatcgtggctacgccaaaaaagcctgagcgtatgcgcgggctcacctgcccttggtaaatcccatgcgggaacacgaagcaccagcggagccagtaataagggttggcgaaccacacccctgccgtcggtggtattgacaccgacaatcgtaaagggggctagcggtggaatatcagctaaaacgccggcaccggctgcagcaggagtggttggtgttatgccagtcatattccggcctcagaataagtgttaccgcgccgagccaggatggaactgcgtcaccggctcgctgttagaaaaattaaacgcctaaagccccgcgccggatactgtcattactaacaggtcgagttgaccattcgtcgttttctgcgctatccagccgccgccgttttctaaattttccttgacgcaaacagggcaactggcatttcatgaaaccggtttcagctgcatgcccaaaaccattaaatccaataagaaaggcccgccaccgtgacttcattttccgccgcccagcgcagccgcgtgaccatgcttgatgtggccgagcgcgccggcgtatcaaaggccagcgtgtcgcgttttatcggtgatgaccgagccctgctctccgacgccattgcgctgcgcatcgagcaagccatcaatgaactcggctatcgccccaaccagatggcccgcggcttgaagcgtggccgtacgcgcctgatcggcatgctggtggccgatatccgcaacccctattccattgccgtgatgcacggcgtcgaaaccgcctgccgccagcacggttacagtctggtggtgtgcaacaccgaccgcgatgacgagcaggagcgccagcacctggcagcactgcgtgcgtacaacatcgaagggctgatcgtgaataccctcggccatcaccttgacgagctgctgcaattgcagcgggaaatgccgttggtgctggtggaccgcaagatcgagccgctgcacagcgacctggtggggctggacaaccccgcagccgtgcgcatcgctgtggagcacctgcaacagcagggctaccgtgatgtgctgatggtgagtgaagccaacgatggcaccagttcacggcttgagcgccagcagagtttcaaagccgagatggcccgccgcacacaaatgaccggcgccgtgctggagctggacgatgggctggaacataacctcaaggcctttctgggaaaggcgggtcccaaggcactgttctgcgccaatggcattgccgctctggccagtacgcgagccctgaaaaatctgggttgcaacctgtttgacgatgttggcctgatcgcgctcgacgacctggattggtaccccctggtcggcagcggcatcaccgccctcgcccaacccaccgaagcgattggcgccagcgccttcgactgcctgctccaacgcttgcgcggtgatgacgcaccgacacgcaccctggattttctgcccgagctgattgttcgcggctcaacctgtgggagccagctcccactttaatgattctttgcgtgaaaaaatgaaaccggtttcagaggtacataacaatgcataaataccccgtctccatcagcctttccagttacggcgccgagctggttcgaaagcagggccaactgagttttgtcgagttgctcagcgctgccggcgcgcaacgtatcgaatggcgtgaagaactgctgaccaccgagcaaccagccactctcgctcaagctgtcgcagcgcaaggccttgaatcggtgttctcctcaccgttggagctttgggtggccggacgagcccagcccaatgcagaactcgccgccacgctggatcgcgcccaggcattcggttcgcgctggctgaaagtctccctcggctacttcaccgatacgaatgacctgcaaagcctgcacgccctgctcagccgccacccggtcaaattgctggtggagaacgaccagaccctgcacggcgggcggatcgagccgatgcagcggtttttcagtgaagtcgagcgcctcggcctgccggtgaagatgacgttcgacatcggcaactggcagtggcaagaccagtccgccctcaccgccgcacgcctgctggggcgccatgtggattacctgcattgcaaggccgtggcgcgccgggcggacggcaagctggtggcgctgccgccgggcgccaccgacctgcatctgtgggaacaactgctcaaacatatgactcaaggtattacccgggccgtggagtttccgttgcggggcgatgacctactcgcggtcaccgcgcaacaggttgccgccctcgcccttcttggccagccccgtgtggagaatgcccatgtctgagatcgatattctgtcgtttggtgaaaccatggcgatgtttgtcgccgagcagaccggtgacctggcccaggtggcgcagtttcacaagcgtattgccggggccgacagtaatgtcgccatcggcttgtcgcgcttggggttcaaggtagcctggctgagtcgtgtaggaaatgattcgctggggcggtttgtggtcgatacgctgaaacgcgaaggcctcgattgccgtcatgtagcggtcgacccactgcaccccaccggctttcagttcaaatcccgcgaagaggccggcgccgaccctcaagtggaatatttccgaaaaggctcggcggccagccatttgtccgtcgccgccatcagccccgcactgttagaggcgcggcacctgcatgccaccggcattccgccggcgttgtccgaggccacccgtgaactgtccatcgagctgatgacacacatgcgcaaggccgggcgcagcatttcgttcgaccccaacctgcgccccgcgctgtgggccagcgaagcgcagatgatccgcgacatcaacgccctcgcagccttggccgactgggtgttaccggggctgggcgaaggtcgcctgctgactggtttcgacgacccggcggacattgccgcgttttacctggaccagggcgccgaagccgtggccatcaagctcggcgcagacggcgcctattaccgcacccacatggaccagggcttcatcgccgcggtgccggtggaaaaggtggtggacaccgtgggcgccggcgacggttttgccgtgggcatgatcagcgccctgctggaaaacctcagctttcccgaagcggtacagcgcggcaactggatcggcagccgtgccgtacagagccgtggcgacatggaaggcctgcccacccgtgcacagctgcccagccgatccgttgcctgacccacccctacctgttgccacaactacaacaagctcaggagccaccccatgcaaacgctgaaactcgccacccgccgttggtggtacatcatgcccatcgtgtttattacctacagcctggcctacctcgaccgcgccaactatggttttgccgctgcctccggcatggccgaagacctgatgatcacccccggcatgtcgtcgctgctgggtgcactgtttttcctcggttactttttcttccaggtgccgggggcgatttatgcgcaaaagcgcagtgtcaaaaagctgatttttgtcagcctgatcctgtggggtggcctggccaccctgaccggcgtagtgtccaacgcctacatgctgatcgccatccgcttcatgctcggcgtggtcgaagcggcagtgatgcccgcgatgctggtgtacctgtgccactggttcacccgcgccgaacgctcgcgggccaataccttcctgatcctcggcaacccggtgaccatgctgtggatgtcggtggtctcgggctacctggtgcagcacttcagctggcgctggatgtttatcatcgaaggcctgccggcggtgatctgggcgtttatctggtggaagctggcggatgaaaaaccggccaatgccaagtggctgagtgacagcgaaaagcacgacctggaaagcgccctggccgccgagcaagtcgggatcaaggcagtgaagaactacgccgaggccttccgttcacccaaggtgatcatcctggcgctgcagtttttctgctggagcatcggtgtgtacggctttgtgctgtggctgccgtcgatcctcaaggccggtttacagatggacatggtcgaagccggctggctctcggcgctgccctacctggcggcggtgatcggcatgctcgctgtgtcgtggggctcggacaagctgcaaaagcgcaaacgctttgtgtggccgccgctgctgattgcctccatcgccttttatgcgtcctacgtgctgggcgccgaacatttctggtggtcctacaccctgctggtgatcgccggggcctgcatgtacgcgccctacgggccgtttttcgccatcgtgccggaaatcctgccggccaacgtcgccggcggcgccatggcgctgatcaacagcatgggcgccctcggctcgttcggcggctcctggctggtgggttacctcaatagcagcaccggctcgcccggcgcttcgtacctgctgatgagcggcgcgctgctgctgtcggtggtgctgacgattttcctcaagcccggcgccagtgatcgcgtgcgggtgccaaccttggagttgaaggtaaaaacctcatgaagaagtctgtcgtactctacaaaaagctttccgcacccttgatggcacgcctgcatgaacaggtcgacgtcaccctgatcgaagcgctggatgacaccggcctagccaaactgcgcgacgcgctgcccagcgcccagggtttgttgggcgcgagcctgcgcctggacgccacactgctcgatctggcgcccaaactggaagccgtggccagcgtctcggtgggggtcgacaattacgacatcggctacctgaccgcgcgcggcatccttctcagcaacaccccggacgtgctcaccgaaaccaccgccgacactggcttcgccttgatcctggccaccgcgcggcgtgtggtggaactcgccgacatggtgcgcgccggccagtggagcaagaacatcggcccggcgcacttcggcaccgacgtgcacggcaaaaccctgggcatcatcggcatgggccgtatcggcgaagccctggcccagcgcgggcattttggttttggcatgccggtgatctaccacaaccactcacccaagccagcagttgaaaaacgttttggcgcgcagtaccgcagcctcgagcaattgctcaaggaagccgattttgtttgcctgacactgccgctgaccgcagaaaccgagaagctgattggcgctgaagagtttgcgctgatgggttcgcagacgatcttcatcaatatttcgcgcggcaaggtggtggacgaagcggcgctggtcgaagccttgcagcaacgtacgatcaaggcggcggggctggatgtgtttgaacgcgagccgttgaaccatgactcgccgttattgcgtttgaacaatgtggtggccacgccgcacatcggctcggcgacccatgagacgcgcgaggcgatggcccggtgtgcggtggataatctgttgcaggcgttggctggggaaaagccgaaaaacctggtaaaccccactgcctggaaaccctagttcctgaaacaccccacaacccctgtgggagctggcttgtcggatcgccgcaccgctgcgatagcatcaccgcggtgagcctgatacaccgaggtgcctgcatcgcaggcaagccagctcccacacaagccagttccacagttgagaggcagcgactgtcagatcacaaacctggccaccatcgcgttcaaatccaccgccaaacgcgacagctcatggctggccgcgctggtctggttggcgccagcagccgattgggtcgccaggtcgcggatgttcaccaaattgcggtccacctcacgcgacacctgggcctgctcttccgaggcgctggcgatcaccaggttgcgctcgttgatcaagctgatggactgggtgatctgctccagcgccacgccggcggcacgtgccatttccagggtgttgtgcgtgcgctgattgctctgctgcatcgactgcacggcttcgccggtgccgttctgaatgccggccaccatcttctcgatttcctgggtcgattgcgccgtgcgatgggccagtgcccgcacttcatccgccaccaccgcaaagccacgcccggcttcaccggcccgcgccgcttcaatcgccgcgttgagcgccagcaggttggtctgctcggcaatggcgcggatcacatccagcaccttgccgatgtcgcggccttgggaggccaggccttcaatcagcacggcggtgttctgtacatcctgggtcatggtctggatcgcgccgacggtttccactacccggtcgcggccttcacgcgcggcctggttggactggctggacgcctcggaggtggacactgcattgcgcgccacctcttccaccgcagcggtcatctcgttgaccgccgtggcggcctgatcgatttcgttgttctgttgctgcaggcctttggaggcttcttcggtgaccgcgctcagctcttcggcggcagaggccaactgcgtagccgagccggcgatgtgctggatggtctggcgcaagttggcttgcatggcagccagggcgccgagcaggcgcgcgggttcgtccttgccgtcatcctcaatggttttgctgaggttgccaccggcaatggtttcagccacggccacggctttgcgcaacggcgtgacgatgctgcgggtcagcagccaggcgagcagcaccgtgagcaaggcggcggcgaccgcgaacacaatcacaccggtaatcgcgccctgatagctggccccggcttcactgtcggcgtccttggcgtcggccgcattgatcgcgatcaacttgttcagttgctcgcccatctggtcggtgccgtccttgatgcgcgtattgatcagggcacgcatctcatcgatcttgttctgtttggacaaggccagcatctcggcctgcgccttgaggtagttgtccagcgtgctgacgaaggtcttgtacagcgctgcttcctccgtgccggcaggcaacgccgcgtaaccggtttgggcggttttgactttttcggtcagcacacccatgcgggtttcagcttcttgcaggcctgccggctcacggttgaccaacacgcgaaacgacagaatgcgcaggcgcagtacgttttcggtgatgttgccaaggtaggtaacgctgggtagctgcgtggcgctcatgtctaccgacgactggcggatctgcgtcatgcggttgaccgcaaacacccccagcaacaccactaacaacgcaatgaacgcgaaaccgagaaacgctcgtggggcaatattcagctgacgcagggacatagggggatgctctcagaatagtgtttgcgagcgtccctgccgcgaaacgatcagtcggcgttaacgcaccgctctgacctttggctaccactgttatggttggaatgtgggcctatacgaggtatcggcagcaccgggggttttgcgcagggcgtccataaatatttttttacacttctgacgaccggcagtttctggcatcctgcgcctccattttctgacccgggcccgcattgtgtctgacgctcaagctcctcgcccccgctataaatccgacctgatctacggcctggaagaccgcccgcacttcacggcggcaatctttgccgcgctgcaacatgtgctggcgagttttgtcggcatcatcacccccaccctgatcgtcggcggcgtgctgggcctggaaagcgaagtgccctacctggtgagcatggcgctgttcgtgtcgggcctgggcacctttgtgcaggcgcgcaagttcgggccgatcggctccgggctgctgtgcctgcagggcaccagcttttcgtttatcagcgtgattctcagcgccgggttcatggtcaaggcccggggcggcggcaccgatgaaatcctctcgacgatctttggcatctgctttttcgcggcctttatcgaagtggtgctcagccagttcatcggcaaattgcgcaagctgattaccccggtggtcaccggcaccatcattaccttgatgggcctgtcgctgatcaaggtagcggtcaccgacatggcgggcggctttggcgccaaagacttgggcgccgcgagcaatttgggcctggcggcgctggtgttgctgacgattgtggtgctcaaccgcttcagtaatccgttcctgcgcctgggctcgattgtgatcggcctgaccctgggctttgtcgtggcgtggttcatgggccgcgtggacctggccgccctgccccaggtaccgctgatcagcgtgccggtgcccttcaaatacggcttctcgttcgactgggtggcgtttattccggtggcagtgatcttcctgatttcgcccctggaagcggccggtgacctgacggccaactcgatgatttcccaacaacccgtcaaaggcccgctgtacatcaagcgcatcaaatcgggcctgctggccgacgggctcaactcggccatggccgccaccttcaacagcctgccgatggtgaccttcgcgcagaataacggcgtgatccagctgaccggcgtggccagccgctacgtggcctacttcattgccggtttgctggtgctgttggggttgttcccgatgattggcgcagtgctgcaactgatgcccaagccggtattgggcggcgccaccctgatcatgttcggcaccgtggccgtggcgggtatcaagattctggccgaagccgggctacaccgccgtaacgtgctgatcgtggccatctccttaggcatgggcctgggcgtcgccgccgtaccggaagtgctgcgcgaactgcccaaagcgttgcacaacatctttgaatcgccgatcactgtgggcgcgttctgtgcaatcctgctgaacattttcctgccggaagagttcatagagctggaagaagatgaatttgatccagagtcctctaccctcaaagtcatgcaggacccggacgtcacgaaataggagcaactttcaatgcgcaagctcatggttctatcgttactgctactgaccttgagcgcctgcgcgctgttccccaaccgtgaccccgtcaacatcaacgtggtgggcatcgagccgctgcaaagccaggacctggaagtgcgctttgccgtgaagctgcgggtgcaaaaccccaatgaaacggcgatcgactacagcggcgtggccctggacctggaggtcaatggccggccgctggcgtccggggtgagtgaccaggccggttccattccgcgtttttccgagacggtgctgaccgtgccggtcagcgtttcggcgttttccgtgttgcgccaaaccctcggcctgagccagacccaaagcctgaacaacctgccctacaccctgcgcggcaagctggcgggcgggctgttcggcacgatgcgctttgtggaccggggtacgctggacctgccaaatacggcgacctggtgaacaccatgcaaccgaccttattcactgaacgattgattctgcgcccgctgaccctggacgacgccgagggaacccagcagcaattcgcgcactgggacgtggtgcgctacctcaacgccgaggtgccctggccctacccggcggacggcgctcgcacttatctggaacaggtcgccttgccggccatggcgcgcggcgagcattggcactggtcgatccgcctcaaaagcgcaccggaacaattgatcggcagtatctgcctgatggacgagcaggacgataaccgtagcttctggctgggcccgcaatggcaaggccagggtttgatgggcgaagccagcgcggcggtgaccgattactggtttgaggtgctcaagcgtcctgtgctgcgtgcacccaaggcggcgcccaaccagggctcgcggcggatctccgagcgcacggggatgcgcttgatcaggacgcaagaaggtcactttgtaagcggcgacttcccacgggatatctgggaaattacccgcgaagagtggctggaatccaagtccaaccaacgatgaagatcaactgtgggagcgggcttgcctgcgatagcggtgtgtcaacttgcacatctttaatagatacaccgctatcgcaggcaagccagctcccacattttttaccgtgttttagtcagtgatagagcgcacgcccagcttggcccgttcgtccacgaccaactcaaacacatccggccgcgcgtaatgccccaccacgtcatagtcataccgcgcacgcaccagctcgtcggtatcgatctgtgccgtcagcaacccggcgtcacccagcaacggcccggcgaggatgtcgcccatggggccgatgatcacgctgccaccggcaatcaaggggcgtccggctggccagttggcaacctccacacccaacgcctcgggagacgcctgcacctggcacgcgctgaccacaaagcagcggccttcgtgggccacatggcgcatgctgacctgccacatctcgcgctcatccaccgtaggcgcgcaccatacctcgacgcccttggcgtacatcgcggtgcgcagcaacggcatcatgttttcccagcacaccgcgccgccgatgcgccccaccgccgtgtcgatcaccggcaaggtcgagccatcgcccttgccccaaatcagccgttcggtgccggtgggcatcagtttgcggtgcttggccaccaggccgccagccggttcgaagtacagcacggtgcaatacaaagtgctgccactgcgctcgatcacacccacgaccaggctggccccggtgcgagaggacaacccggccagcgcctgcgtttcggcaccgggcacatcaatggcattggcaaaatagcgcgcaaaggcttcccggccttccggcaggcgatagcccaactgcgtgccgaatgcctcgcccttgggatagccgcctaacagcgcctcgggcatcaccaccaattgcgcaccactgcgcaggattttgtcttcataagccagaatctgcgccagggtttcagccttgccacccggcagagagccgatctgtaatgcggctaccgtcgaaatcgccatcacgcttactcctgaaaatgaaggtgctcattctccggccagccacaagcgtgaataaagatcgattcagttctaaatgatataagccaaatgaatatcgcccaggttggccttgaacctgctcaaacgctgcaaaaggtacgcgaggcgattgtggcgagtgttacttcgccgccgccatgagcttgttgacttcgctgcgcaccatgttcgagaactccggcggcgtcatgccatccagctcggcacgcacccattcagcccacttgcccttgcgcttggcgcgctcaccgaacaagcgtgccgcttcgcccttggccttgcccaggttggtttgccacaggtcgtagaggcgggacttttcatcttccagctcggcacgttcggcgagggtcttgttggcgagattgaagctcatgttgaattacctgctgcacaaataagtgacatcttacacgccaggccgctgtttcttgatccggtttttgcccgcggcaaaaaaactgcaacttttggcgctgcccgatactccattgttcactgtcacattcacctgcaaggagtcacacaatggcccgcaaatctgccgcccaagccgtcgaagaacaaatcaaggatcaagccttcagtgaactgacggcgttgatcgaagaatcggacaaactgctcaaaagcagcgcatcactggtaggcgaggaaggcgaaaccttgcgtgagcaagtcgcgatcaaactcaagcaagcgctggactcggtgtccaacgtgcgcgagcgcagcaagcctgtggtcgatgccactgaaaactatatcggcggccacccatggcagaccgtcgccatttccgccggcttcggcctggtggtaggcctgctgctgggtcgccgtaactgatacccgggggctgcgccgttggcgcggccccttctagccgttggccagggcctgaagctgcgcccattccagtgcgtcgatgacaatcccctcctgttccgacttcgcccgcgtgcgatggcgacgatcccccggcaaacgccgcaaccccgcagcatgcatctgccgcaccagctcctggctgcgctcggcaaagctttgcccagcggttttgctggggtcgatcaggatcagcaactgacctgtccagggcgtacgtgcgcccgggtggtccgcccaattgaactcaaaagagaagttcccgccggttaacgcagcggccagcaactcgaccatcatcgacagcgccgaccccttgtggccaccgaacggcagcaacgcgcccccttcgaggatggctttcgggtcttgcgtcggttgccccaggctgtcgacgcccatgcccggcgacaagcgctcacccttgcgcgcagcaatctgcacgtcgccgtgggcgatggcactggtagccaggtcaaagacgatgggcaaaccgtcggcacgcggggctgcaaacgcgatggggttggtgccgaacagcgggcggtcggcgccatggggcaccacgcaggtcatgctgttgaccacactcagggccaccagcccttcctcggcgaagggttcgacgtcgggccacaaggcggcgaaatgatgggagttatggatcgccagcaaggcgataccggcgctgcgagctttttccaccaacaaggcacgcgccgcttccagggctggctgggcgaacccgttggcggcgtccactcgcacgaaccctgaagccacatccgtcacgacaggcacggccttgccatccacccagccgctggccagtgtgctgatgtaacccggtatacggaaaataccgtggctgtgggcgccgtcgcgctcggcgctggcacaattgcaggcaagcacagaggctacttcggcagaggtgccatgccgcacaaatacctggtgcagcaacgccaccagttcgctgaagacaatggagacacttgacccctcaattaccttggacggcgtagacatctgaagctccgattttatgattggaaggcgcaacaagacgagaaaccagatctgcgattaaacaacgagccctgcatctgctgtcaatcggcgtttgccaccccgcgtttttttgcagcagttatctaccgcaggccgcaaatccgcaccctctacgctgcctcttgattggccaacccaggtcttgatggagagcgatagatgactagcatcagcccaccctattttttcagcgagtttcaccagcccgtccacaggaagcatccctcaccacgagagagtgccctgggattgaccgtcaaggacctggattggttgaacacgctgtactacgccaccgacgatgcacgccaggacagtgcgtcgcgcaactatgtgatggtggtcgagaagatgacgctggaaatggcggataaatccaccattgcgctggcgggcgccttcttgatgagccccagccctgatgacaacaaggcgttgctctataccccgtatggcggaatcgaagtattcaacagtcgggcaaccctgctttcaaacgttacaaatcgccttaaaaacaacaaacaatatattgatttaataaattttttttcaatttcagagcgcgaaaaattcacttcgaacgcccagttcaccctcacgacggccctcatccctggcgccgtttttgaagaccagcagaaagccattgaagccagccaactccacaatgtgcaaaacatgctcgatgccctgcgcaccacaccgagcctgccgtcaatgctcgaaacgctgctgggcataatggcgcgttcgttttttccaggcctcgatcagcgcgacacacgagtcaacagcttcaacgcctgcgcagaagaggacgcgcacggcgtcgatcaatgggtggcttcggtcagcctgagcgcaacgttgctgcagtattacctggaccaggcatggccggcgggacacacccgcacctttaccaacccgcgacacgtcaccaccgggttctccaaaagccagcgcaagcaagaccgcgagctctgggaaagcctggtggaacagacggccggaaccctgtccaaactgctgggtagcttgttgaagacctggtggaacgaagacaccggcaacggccaatcgcgtcaggatctgtttgcccaagtgataagcgacaaattccgcgccgacctgttgttcaaacgtcaaggcagcattgtgtcagccgaggagcatcagcaactgctcgccattttcctccccgatcacatcgcacggactgcctggcgcggcacgcagcgtatcgaaaaagtcagcgtccatgcccccttccagcactacgtcgagctggccgccaccttgatgatcagcgatacccatacctacctctacacacagacacgcgggctgcaagtgctcaaggatcaggccgacctcaatgacaccctgctgagcatgctcaaggccgcagggcatcaagacgaattattgaattacctctcccttgacgaacgcaacctgtatatcgccatggaccaggtacaggtcagtggccgcccgatgcacggcagcgtattcggctcgatggtcgaggacatcgccaccaaacagctgggaaatatggagtacgccctggggttgtttcgccgcagtggcggtgcggtcgacctggaggccctgctcgattgcgccctggacgtgcgcgcgatgctcgacagccggctgttgggcagggacgccgcaggtcgctggagcttgcacccggtcagcgcagaccatggcgggccgtcaacgatgcaggcagtgcgggcaaaacagcagtgggtggcgctgcaagcagccgaggccacgttgaggaggcaacgagacaaccatcccacgttgcgccggctggccatacaagccctgaatcaggaattgagcaagcgcctgctggatatagacgccgccgacgtgtacgccaatacctaccccaccgaagcgcaaccgctggaagaccgtgacccgctgcaatcccaaagcatggttgagcactttatcgcgcgcctggcaaaagccggcaacccgcttggcgacacacccgacatgggcctgtacagcggccgcctccaaggtagcgccaaacgctggaatacgctggacagtcgcaccttcaacgccgtcgttgatcaggccatgacacccttcgttgagcatgacatccgcacacttccccgccagttcctggacagccatcgagaccagatgggctacgccctgatgcgcgggctgcgcagtgaggccgaattgcggttgctcaacaagacattgagcccacggcactattcgattctcgacaccgtcctgcaccctgacagcatgacccgggaaaaacgccacgggctgcacggctttctgccggacgcttacggcttgacgctgaaggtcggcgagacactgcatgccctggccaactgttttgtgttgaccgaacggggcgggaccgacatccagcgctccggccacactgtcctgtggactccacagcgtggtcacgaacccttcacgtcggtgcaagcgctgcgcgacaggcttgaacaacgcttggcagacgccgaccaacgtattgccctcctgcaaaatttacccatcagccaacgccgcccccatcaggttttcacgctggggccactgcaacgcatcgacgagcatttgatcaataaccgccaacaaagttatctggactatcaactcgatagcctggaccgctggctcgccatgcccttgagcccgaaccggctacaggactgcctagacaccgaaatgcagcaaatggcgccgtcgaacctgtaccgggccaaagctatcgcccaagcaatgattcaacagcaagccttgccggtgtggctcggcatggcctccccccaggagcagattcttcatgctgaattgctggagcaataccgcctcagtgcaccggacgaccgtgattacctgcacagcgtgccaacgctacgcgagcacgtcgccagcggcttgcaggcactgttgaaaaaacgcttccctgacatagcgctggatccggaagacatcctgattacgcctcgtgggatacacaatgggcataccttgagcctgactgatttcgcactgcgccacttacccgacttgcacgctgacaaccttcgcccctacgcacgcggcgccactcctcttccctcaaccctcgatggcgtggcggtggagcaactggtgcgacaagtgaacatcgctaacacctaccgtgacctgctcacccctctactggcctcgaccacgcaagagacacgcaaacgccaggttctgttttgccagcaattaccctggcaattgctacgccatgcccaccaggaaaaactcgaagaacgtctgagtgacatcgcctgggaccttgtccagcaggtgttcgatatgcccgacggtgcagcacgccaagccttcagcgccactgcggcgctggtacggccattggagctgatcgccacacccggtgcggcacccgtgaaggtgccgggcctatacctgataggtccgcagccaccgctctctggcccctgggtgctttatgcaccttacagcccgcaacgggtgctcagcgaatacgcgcgggaagctgatttgctcaaggaaatcaatcggccaggccccttgcagacgtggatcatccgccaactggatgacccataccaggcaacctggcgcaacctgttagccacccctgcgccggccgatggcactgagatcaccctggcctcgtcgcccgtcagggggaatattctgctgcagctgtttaccgacaacactcaacagttactgaaaatgctcgactgccaattcgacaaagacggcaaagaccaatgggattgtattaccggcctgctgcgcaaagaggttcccatggcgttgcagtttctcgccggcaaactcaagttcccgcaggtagtgtggcgcagtttcaagctgtttgaagactccgccgaagccttgcagaatcagcacttcggcattggtgtgaagaaatttgctcaggggttgtccgccctcgcttcgctgcgcagggagctggacgccctcctccccggcgacagcgcaccgctgccgacagatgttcccgcagcctcgcccgataacagctccccgcccacgtccaccgtcagtacaccggatatcaccgaaccgctgcgcacccgcctgcggcactttgaagacgcctcggtcgccctggcagatttgcaggaaagccccaaaaaccacctctatacacaggtctccagcaaccgtgactttgtgcccgtcgcgggcaaggtctacccggtgaaaaaagccggtgagcgttggcgcgtagtcaagggggctgacctcggccctcatgtcgagcgcaccccccagggccaatgggtgctcgatttgacccgccaggagccacgattcgggccggccttgagtcgccctgtaaaccggtacaatacccaccgagccatccgcgaggccatcaatgtacaagcacagggcatggataatatccgcgcgttgtctccgttcatggccgagtgcatcaacgatgcgatcaacgtcgctatctactatgcggtgacctgccagcgcaatatggcgcttttcgaacagctgcgtgcccctgattcacgaacaggccgcttcctgacggagatgttcggcatcctcaacttcaacccgggtcaggtggaaagaatccaggcacgtgtcatggaagtcctcaacgggctcagcgatcacacactcaccgtccatgactcccggcgatttgtcaccggtacagccaattgggcttcaaacgagaccttcgccttcgtgatcccctccgaccgcgagcggagaattttcttgctggaccctttctttaatccaggcatgcatatctaccagccttacctgaacgcgccgtttgacgtcaatcagcacgcccgcgcggcttccctgatacatgaattgggccatttgacctcactgaccgaagacattgcctatctggacagcatgcgcccgttccaggacctgatcggccgaggcaccgcggatggcctgaagctatacacggccctttccaacctgcgcgacactgcgctgtccacgcttacacctgccaccatgttgttcaaggcacagaatgagctgacagatctttgggaggacttcggacaccacggttcgaccaaattgcgcgacagggtattgagtctgacgggagcgaagacgttgaatgaggcccggtcggtatttatgtcagacccggaccgaaggctgaacatcatcctggccaatgcggattcggtgacgtacttgattacccatttgggaagggtattggattcgggggcctgagcaggcccccgacgagtcattcagtctttctggtcacgcaaaatgttgccggacgcgccgtcaatgcgggcttcgtacactacgccgtcagatttgcgacctttgacttcccagtagccgtcgttgtccgcctctgcggcatacacctcgacataaccggccttggtcttggcggtttcaatcgccttttcgatgggaatccagccggcgcccggtttgtcggccatggccgcgccggcactgagcagagcggtggttgcacacagggcggctaaggttttcttaagcatgttcgtactccattaggtaatgactgattcagtcctgaattttttaggtgctttcaaacgagaataagttccaattgatgtgcaatcgccatgacggctgttctcgccatcgacctgtggaggttagaatgtgcgaaatcaggatgagtaaatgaccgaaaagtctgtttcagaagccgaatatgacgctatcaccgacgccgctgcgcattggtgcatgcggctgcacgcgggcgattgcacctccaaggaacggcaggcctttgaacagtggcacgatgcgcatccactgcatgcattcgaatacgccgccatgctcgaaatctgggacgtggctgaccatttgccacgccatgaacccgtctcgaccgtaatgcctttcaaacaccgcagccggttgcgcacctatgccgtggccgccgctgtatgcctggcagcccttccgctggccgcgttcacgggttgggaagcgggctggctgcccaatgcctacgaacatgtcgaagccaccaacgggttgcgtcaggtcacactgagcgacggcagccaggtggaactgaacctgggcacggaactggtgtacagcaactacaaggaccagcgccaggtcacgctgaaaaagggcgaggcgttcttcaaggtcagccatgaccgtgagcacccttttatcgtgtacgccggcgacggcagcgtccgcgtaaccggcacccaattcaacgtctggaaatatgaagaccaggttcgggtgatgctgcttgaaggctcggtgcaggtttccagcgacaaactgcacgccagtgtggcgctcagccccggcatgcaggccagctaccatcagggcgatgccacgcccgatgtgcagccattcaacccgaatgacaccgccctggcctggcgaagcggcaagctgatcctcgacaacctggcgctggccgacgcattgccgctgatcaaccgctacctgaacaaaccggtgatgctggcagacgccacgaccggggcgattcgtatcggcgggatctacaacatcaatgaggtcaacaacctcgtcccctccttgcccaaggttttaccggtctacctgacccagaaccaggacggcaaccccgtgctcaacgccatcccgcgtaaagcgccgaaaggctgaccctttctcctgcccaacagggcaggttcgcgcccacagtgtccatttttgaaacacctgcgccccttgaaccgcccgcgtgatgcggattcatcgttttgtcatggccactgttacatcgctgatacagcctgaaggactcgacgcggcgttgcagcgcatgcccgcccgggctggcgttgtctcaatggtgaaacaccgcgactgacacgccgcctggttttataggcaaagcattgaataacaacaataaataaaaagcggcacgcgttctgctctgtcccttgcagcgctgtttagggtcagcgcgaagaataaggaacattgccgtggacacacacaatccgggctcactgagcctcctgctgatcagctgtgcattgagtgccagcgtgagcattccggtgcttgcggcgggtgatggtgtgattgttctggaacgtcaggtgcacccttatgtgatcggccgctcacgcggcatggaccccaaccccaccaccgtcaatgccaacccgtcgacacagatcaaccacgctgtcagcaacgagctcaacgataacgacatcgcaggcatcgccactggcgcaagcatccatcgcaccctcatgcccaacggcaccctcagcggcctgaacacgctcggcaccgcaaacggcctgggcgcgggaggtgcttccagcctgggcgggggcggcagcggcggtggtatttcgggcacggtcaacggtgcggtatcacgcggcctcgccccgttgaacaacctcggcggcatgatcgggggggcaatgaaatgaaccgttccctgatccttctggcggcactcagttgtacagccgcgatggccgacagcaacaacaactcgaccattgataactccggcaagcaatacaacggcgtagtcctgatcaaccaggccgcgggtgaccagcaacagctgagcaacaacgtcgccatctcagcgggccgcaacgcccagtcgaacatcagcgtcacgcaaaaaatcagcggcgcacctgccgaccgctccctgaacgccaacgccgcgatccagggcaactctttcagtaacggcagcggcgcactgagtgtcaaccagtccgccggggcccagaaccagatgatcaatgccgtgcgtatcagcgtgaatgctggcccgcaaagcatcgacgacagcgtcatgtcgcaacagaacgttgcgcttgcaacagactcgggattgaccgctaccactggcagccgccaagtcactaccagtgaccaggccttcaccggcagccgtggagtggtacaggtcaaccagagcgccggggtggggaaccgagtggctaacaccctgaatctacgactcaactgatggagctgagtcgactgctggaaagtaccaacacttaaccaactaaatagaagcaaggagatacaccatgaaaacttcaatggctcttaaaccactggctttcgctctcgctgcgctcatggctgttgctgctcaggccagtggcccccacacgcctacttcggcgactgcggccgctgcggatggtcaaagcaaccatggcaacgtggtgctcaatgacaaaaccaaaaacaacgcttcgtccaacgactcgtacaacaacatcagcggcgtggccaacggcaacgtgctgagcggtgacaacaaccaaggcaaaaacgacgtggtcgtacagtctgccgatgccgatttcgtgtttgcctcggtgaactccgcccaatcgaacaccggcaacctggtggtcaacagcggcaccaaaaacaacgcttcgctcaacgacagcggcaaccacgcttcgggcatcattcagttgaacgcggcggcgggtaactccaaccaaggcatcaacagcaccgttgtacagtccaacaaagacggcagcggcggcgctgcaaccgtcaccggcgtgcaggacgtgtccggcaacctggtcctcaacctgagcagcggccatggctggagcaccaaaccagtcgtgaacaacgccagcgtgaacaactcgatgaacttcagttcgggcatttcgaactccaacactctgtcgggcagcaacaaccagggccagaacaacgtagtcgtgcaatccaccactcgcttctgatccagacagggccttggagacaaggccctttttatttccagtgtccaacaggtcatacgatcatgcgcctcgttgccttcctcctcctgttcgcactcaccggcccgacctgggcagggcaagtggctatcgtcatgcccggcggcggattgatgtacaaaaaggtcgagagcatccgcgagcgcaaattcgccaacctggtggaacagaaaaccgatttcagctgcggcgccgccgcactggcgacgatcttgcgccaggcctattggatggacgtggatgaagagcacgtcatcaagggcatgctggtcaacgccgaccaggatctggtgcgcacccagggcttctccatgctggacatgaagcgctacctggaaagcatcaacatgcgcgccaagggctaccgcatcactccggaagtactggtcaccgtgaaagtcccggtggtcgtgctgctggacattcgcggctacaagcatttcgtcgtgttgcagcgcaccgacaaggactgggcgtacatcggcgaccccgtgctgggcaacaaacgctatgccagggacgatttcgtcaaaggctggaacggcatcgtgtttgcggtgatcggcgagggctacgacaagaccaacgccctgctcaccccgcgagctccgctgacggcgaaaaaccagttgaacgagttcagcccggtacgcgacagcgaattgatggacttcggttttatccagagcgacttcttctagaagcgcaataaagggcaggacgccctcggagcaaacgatgaacactcgaagctggctgacggccctgtgcctggcagcctctgtaccggcttatgcgtcatcgccattcaagccgatcgaactcaaggattcggaaatggccgacctgcgtgggcggtatgtgatgccggggcgcattgtcagctttggccttgtgatgagtaccacctggaccaacgccgccggcgcaaccgtcaccggcacggccaatatgcaggtcagctcctccactatcacgccacaattttatgtgcagatcaccggccacgatggcaacggcgtgatcaaacaacctgacggctccggcaccgttgtgggcggctcgggcctcggctccggccaaggcgttgtgcaaagcgttcgcgccgcaggggatggcaacaccgccaccaatggcgtcgacatcaatgtgagcaaaaacggcctggcgcctgccaactatgtgcaatcgggccaggcgttgatggcgggccagccgattactggcggcacggcggcaggccaggtgacggtctcggcgcaaaacggcgggttacaaatggcgcttctggccaacaataaccaaggcagtgtcttgcagcagatcggtggcggcgccgtcagccaaggcaccattatcaaaggcgacttcaacgcgatttcaaacatgacccagctcaatgtagtgctgggcaacaacggactgaacaacatcactcagagcctgaacctggaacaactcaaaggcctacgcacttccggttattgaactacgctgagccacgacacttacgcattagaaagggacggcttatttcatgcatcgatcgttatcgctacgtgccgtggtttgtttgagtacgcttcttcctgcgtccatgctgtatgccgcgccagatgccgacatcgaaacgctgaagcaggaactgttggaactcaagcaacgttatgaagtgcagcaaaaagcactggccgtactggagcaacgcgtacgacaagtagaagatcaaccggcaacgcctgcccccaaacgcctggccaagtcacccgccgacttccagaaaggcggcaccaatgtggcctctcacaccacgggtgtcggaaccgcagcggcttccggtggcgcagcaggcggcagctcctatgggcaaagcctcaaggacgactcggcaccggcgcaaagcgtgagtaacctctacaacgaggccagtggctttttcggcaatggcaagttcagctttgaaaccggcatcacttacgctcgctatgacgcgcggcagttgtccctcaacgggtttctggcgctggactcaatcttcctgggcaacctcaacctggaccggatcaaatccgacagctggaccctggacctgaccggccgttacaacctcgacaatcgctggcagttcgacttgaacgtgccggtggtgtatcgcgagtcaacctaccagtccggtggcgccggcggcgactccaacgccacgtcggaaggctccgtcacgcgagacccgactatcggcgacgtcaacttcggtatcgcctacaaattcctcgatgaaagcgccagcctgccggatgcggtggtgtctgttcgggtcaaggcaccgactggccaggagccctacggcatcaagctgatcgagcaggccaataacaacaacctcgccgtgccggaaagcctgccgacgggtaatggcgtgtggtcggtgacgccgggtatttccctggttaaaaccttcgacccggctgttttgttcggctcgctgtcgtacacccacaacttcgaggaatcgtttggcgatatcagccccaatgtcggccagaaaattccgggcaagatcagcctcggcgatagttttcaactcggcgtgggggtagcttttgcgctcaacgagaaaatgagtatgtcgttctcggtgtccgacctcgtgcaacgcaaaagcaagatcaaacagagcggccaggactggcagtcggtggtctccagcgacgccaatgcgggttatttcaacgtgggtatgaccattgctgcgtcggagaacctgacgatcgtgccgaacctgtcgattggtatgacggatgatgcgccggactttacgttcagcctgaaattcccgtattacttttgattgaagggggctgctgcgcagcccaacgcggggcgagcccgctcaccacagaggaaaagccccgcaacgataagggtcgttgcggggcttttcggtttacccgccctagcggatctggtgtttgtgcagcaaccggtagaatgttggccgggaaaccccgagcacacgtgccgcgacacttaaattgtcactgtgccggttgagcacatcacacagcgcctggcgttcggcgcggtgcttgtagtcttccagtgtagccatcggtagtgtaattgcctgttcgccctgcaatcccagatcaacggcttcgatctgacgtccttcggcgagcaccaggccacggcgtacgcggttggccagttcgcgcacgttgccgggccacgggtgctggcccatggcgacgagggcgtcttcgctgaagctgcgcgggcggcggccggtttcctggctgtagaaacgcgagaaatggttggccagcatggccacgtcaccatggcgttcacgcaagggggcggtaatcacttgcagcacgttgaggcggtaatacaagtcttcccgaaaggtgcccttctcgaccgccgcttccaggtcgacgtgggtggccgccagcacccgcacatccaccgggatgggctggctgccaccgacacgttcaatctgtttttcctgcaggaaacgcagcaggttggcttgcagctccatcggcaaatcaccgatttcatccaggaacaaggtaccgccatgggccgcttcgatgcgcccgaccttgcgctggtgagcgccggtaaatgcacctttctcatggccgaacaactcggactggatcaaatgctcgggaatcgcaccgcagttgatcgccacaaacggcttggcatggcgctgggattgacggtgcaaagttttcgccactaattctttaccggtgccactgtcaccccggatcaataccggcgactccgtgggggccagtttggcgagtagtttgcgcagttcgcggatgggccggctgtcgccgagcaactcatgggcgggctcatcgaccagcatatggcctttgccccgcaaacgtgccatgccgaacgcgcgccccagggtgacctgcacgcgtgcgacatcaaacggcaaggtgtggaagtcgaaaaaccattcgcagacgaaatcgcctacattttgcaggcgcaacacatcctggctgagcacggcgatccactctgtgccgctgcggctgatcaactccttgaccgcttccgggcgctccagatggtagggctgcaggcgcaaaagccccacatcacaggaacggtcgcctacggcacccagggcacagctgtccacttcccacccggcagcacgcaaacctggcaacagccgatggcagtcatcgcaggggtcaaccacgagcaagcgacgctggacaggtgtaacaaccatgactattccttggcgccaaaattgttaaatttatttagaaacaacggtttgtgaggcctgccgctaacactagcaaggtattgacgccctctttgtaccgtttcgctataagtgctggaaaaaagccgtttatcctgaattcaatgcaaacagccaatccgcttgaacagttcattgcgctttcaaaacagccgcttacatgacccccatcacggaaagttgaaatttcttgtcctaatatgtgacccgtaccccgccatcgtgcatcagtacaagtaacccgccgcacggtcagcccaaccgccggcacttcacttgaatgggcattgagagagaagaccccatgaacgccccgctccgcatcaacgaagctcttttgatcgcagaccgtgctttccagccctttcagtgcgtggcctggcacgatggcaatggcgccctgagcctgagcgtcatcgaccggaccaatacccgtatcggcagcaaacagctgtcttcgagcacttataccgacccggcacaattggaagacttgttgttgcaagcgcgtgcggagctcgacaaagatggctatcagttgcagtcatgggtaatgccgaagtaaagggcagccgcaacttccgatcattgccagcctgcaaaaacaatgatcggaagttagacgtcttacagcgcctgcttggaactaagaataaaccgctcaatcgcctcggcagcgccatcttcaatgttgctgcccgtcacgacggttgcttgacgcttgaccgcctcttcagcctgacccatggcaatcgacaaccccgccacctcaaacatcgctgggtcgttgccaccgtcgccaatggctacggtttgctcaagcggcacgccaaggtgctctgcgagggttttcaaggcgtcgcctttgttggccagcatcgcggtcacgtccagataaatcggctgtgaacgcgatacgtgggccagcccctctaccttgggtttcaactgcgcttccagcgctaccagcaacggcgcgttgtggctggccgcgacgatcttgttgacccggtccaggtacggctcaaaactctccaccacccgcggcccgtagcccaggcccgctgcttcaacgacgaccatcggccccggcggatcacggcgcagccactctccctcggcaaacacccagacttccacgtccggctcgaccgaaaacagcgccagcgctaccagcgccgcttctgctggcagatgatgcgtcagcagcacgctgccgtcggggttgaccagcgttccgccattaaaaccggcgatcggcacgtcaacgccgaacgcctcggccatttgcatcatggcccgcggcgggcgcccgctggccaggctgaagaacaccccggcatcacgcagcgcgcgcactgcatcgatggtgcgttggctgggcgtgtggtcagggcgcagcaacgtcccgtccatgtcactcaatacaaaacggatggggtgaatcgccgcgtcactcatccgaggctatgccaggttcggccgtcacgggccagcaaggcatctgccgccgccggaccatcttcaccggccttgtaggcctggattccgtcatcttccttccatgcgtccaggaacggctgcacggcgcgccaaccgttttcaatattgtcggcccgctggaacaaggtctggtcgcccgtcatgcagtcgtaaatcagggtttcgtaccccgtcgacggttgcatctcgaagaagtccttgtagtcaaaacccaactcgatattggccatctccagggttggcccaggctttttggccaacaggtcgaaccacatgccttcattcggctggatctggattttcaggtaagtgggcttgagttcatctacgtcggtatcacggaactgcgcatagggcgcgtgcttgaagcaaatcacgatctcggtgtcgcgaatgctcatgcgtttgccggtacgcaggtagaacggcacgccaacccaacgccagttgtcgatcatgaccttgagggcgacaaacgtctcggtgctgctgtcgggcgctacgttggcttcttcacggtagccgggcagctgtttgccgccgatttcgcccgccgtgtactgcccacgtaccgagttggcccgcgcgtcctcccgggaccagggccggatcgcaccgactaccttggccttctcgccgcgcaccgcgtcggcaccaaacgccgccggcggctccatggcgaccatcgccagcaactggaacagatggttgggcaccatgtcgcgcaaggtgccggttttctcgaagaagttaccccgggtttccacgccgacggtttccgccgccgtgatctgcacgtggtcgatgtaatggttattccagaaggcttcgaacagcacgttggagaaacggctgatcagaatgttctgcaccgtctccttgcccaggtaatggtcgatgcgatagatctgcttctcgctcatcaccttgagcaggcacgcgttcagtgcttcggcggtggccaggtcggaaccaaaaggcttctcgatgaccacgcgacggaaaccctcatcggtttcgttgagcaacccggcgctgccaaggcgttgcaccacgtcactgaaaaagcgcggcgcggtggccaggtagaacaccgcattggcggtaccgctggcggcgattttcttgccgatgtcggcataggtgctgtcgtcgaggaaatcgccctcgacgtagctgatgcctttggccagcttggcccacaactccgggtccagggcatcgtcgcctttgccccggaccttgctcgccgcttcggtgcggatgaagtcttcgagcttcttggcgaagtccgcgtcactgatggcattgtgatcgacgcccacaatgcgcaggccatcgtccagcaagccgtcgcgactgaggttgtacagcgccggcatcagcaggcgcttgaccaggtcgccatgggcgccaaacagaaacagtgtggtgggcggagcgggttcggcctggggtttcttgccgttggcggtcattttttggaagtctccacatggccgccaaagccgaagcgcatggcagagagcattttgtcaccgtaggtgctttgctgacgcgaacggaagcgcgcaaacagggacgttgacagcaccggcaccggcaccgcttgttccatggcggcttcgatggtccagcggccttcaccgctgtcggccacggagcctgagtaaccgtcgagtttcgggtcggtggccagggcgtcggcggtgaggtccagcaaccaggacgacactacgctgccacggcgccagacttcggcgatgtcggccacattcaggtcgaagcgctcgtgttccggcaggttttccgaattcttggtcttgagaatgtcaaacccttcggcgaaggcctgcatcattccgtattcgatgccgttgtggatcatcttcacgaagtgccccgaaccggccgggcctgcgtggatgtaaccttgctcggcacgagggtcggccgaagcggagcggtccttggtgcgcgggatgctgcccaggccaggggccaggcttttgaagatcgggtcgagacgctgcacagcgtcgacgtcaccgccgatcatcatgcaatagccacgctccagcccccagacgccgccggaagtgccgacgtccacatagtgcaagcctttttccgacagggctttggcacgacggatgtcatccttgtacatggagttgccgccgtcgatgatcacgtcatcggcttccagcaactcactcagtgtattgatggtgtcttcggtaggtgcgcctgccggcagcatgacccagacggcgcgaggcttttgcagcccggcgaccagggccttcaaatcggcgacgcccgtggcgccctcttcgctgaggcctttgacgaaggcttcgttacggtcgtatacaacggtggtatgcccattgagcatcaggcgccgcgcaatgttaccgcccatgcggcctagtccgataatccccagttgcatgtgctgatgctcctaactgctaaaaaatgtgtgacatagtttatagcgcaatgaggctaatgagggttagtccagagcggatccgtggagtttcatgacaaaaaatggccatcctttcaccatcacccccctaaaagtcacagcgaccatcaaaaataaaaaagttccattgattcaaaaaagaattcagaattgcttcgactgttgccaggcgccccgaatcaagcgctccggcaacgcgattgaccggctatttgcgaggtaagcaatgagcacagcacagatgacccgcccgccacagaccctctatgtcaccgtccgtcgcgacgagttgcgccagttgaaaaacgaacgcgaccagctgcagcaggaagtccagcgcctgcgctcacacttgcaagcacagatcaaccaggcatccggcacccaacccgccctttgctgaacgtaagctgaacgaaccgttcagaaataactcacgaagttttcacatcctcctcccgatactcccgccgagatagggccgcacgtacacggcggcccactgttgcgcgcattcctgcgtggcgactgagtaattttcgggttggagttctggatggcgatgttcaaacgcagcaccaagtctgcgaaaggctttgattgggccggcctgggttggctttttctgttcttctggtatttctcgggtattacccaactcctgattcagctgaccggcacctccggtttcagcggctttcgccaagccttcttcctgagtgcgctgtggctggcgccgatgttgctgttcccgcgccgcacacgcttgctcgccgcccttatcggcgtagtgttgtgggcctgctccatggccagcctgggttatttcttcatctatcagcaggaattttcccaaagcgtcatcttcatcatgttcgagtcgaacatctctgaagccggtgagtacgccacccagtactttgcctggtggatcgtgctggcgtttattgcccacaccgccatggcggttttcctgtggacccgcctgcgcccggtttacctgccgcgtggccagtccatcctggccgcaaccgccattgttctggcagtggtcggctatccgctggtgaaacagattgcgaccaacccgacgatggaactggccattgacggcttcgagtcccgggttgagcctgcggtgccatggcagatgatcgtggcctaccgtcgctacaccgagcaactggaaaacatgcagggcatgctgaccagcgccagccagattccccccctgaaaaacctcaaggacaccatggccggccaaccgtccaccctggtgctggtgatcggcgaatccaccaatcgccagcgcatgagcctctatggctacccgcgcaacaccacgccggaactggacaagttgcgcgaccaactggcggtgttcaataacgtcatcaccccgcgcccctacaccattgaagcgctgcaacaggtactgaccttcgccgacgaagagaacccggacctgtacctcaagacgccgtcgattgtcagcgtgatgaagcaagccggctacaagacctactggatcaccaaccagcagaccatgaccaagcgcaacaccatgctcacaaccttttccgaacaggccgacgagcaggtgtacctgaacaacaaccgcaaccagaacgctcgccaatacgacggcgacgtactggcgccgtttgccaaggcgctggccgaccccgccgagcgcaaattcatcgtggtgcatttgctcggcacgcacatgagctaccagtaccgctacccgccgaccttcgacaaattcaccgatcgccaaggcgttccagctggcgtgagcgacgagcagttgcccacttacaacagctacgacaacgccgtgctgtataacgacttcgtggtgtccagcctgatcaaggactacgccaagaccgaccccaacggtttcctgctgtacctgtcggatcacggcgaagacgtgttcgactcggcaggccacagcacccttgggcgcaacgaaggcaagccgacggcgccgatgtacaccattccgttcatggcgtacgcctcgccaaagtggcgcgaaacccatgactggagcttcgccagtgacctgcagcggccttacagcagctcgcagctgattcacacctgggccgatctggctggcttgagtttcgatgaatgggaccgcaccaagagcctggtcagcgacagcttcaagccgcgccccttgattattggcgacccttatatcgcccagaaaaaaggcttgattgacttcagcctgatcaagccgaaaaaggccgaccctgccgaagtggtggccaagtagtttcaatgctctgcaacagaaagataacaatcattctcgtttgagcctaaagttccgcgcctcctttcgtctttgagccaacgccttttctttccgagaaggcgaaaaagacgacaaggagtccgtcgcgatgctcgcgccctttacccgttccatgacttttaccttcggcctgttcagcctagccttgagccctgacctgctggccgagaccgatcccgaacaccttcccgccaaagcccttgaactgggtgccaccagcatcaccgccgaaggcctgggcaccacaaccgagcacaccggctcctacaccacaggcgccatgagcaccgcgacgcgcctgaacctgtcgatcaaggaaaccccgcaatccatctcagtgatcacccgccagcagatggacgacttcaacctcaacacgctcaccgacgtcctgcgccagacgacgggtgtgaccgtgcagcacctcgactcggaccgggtcggttactcatcgcgtggttactcgatcaataactaccagatcgacggcatgctcagcacttacgggcgcatgaagcccgatgccgacaccatcatctacgaccgcatcgaggtcgtgcgaggcgctaccggactgaccaccggcgccggcgacccctccgccaccgtcaacatgatccgcaagcgccccaccgcccaatggcaagcccaggccggcgccagcggcgccagccatgataattactacagctacgtggatgtgggcggccccctggcatttgatggacgcctgcgcgggcgcacggtgctggcttaccgtgacagccaatcctttcgcgacaattacgcgctgcagcgggaagtaggctacggcattctcgaaggcgacctgacggacgatacgctggtcactgtgggttttgactaccagaacaaacatgtacaaggcagttcctggggcaccctgccctattggaacagtgatggcagcaaagccaagctgcatcgctccgccaacctggccgcgcactggagctcctggccgctcaaagacaagaccacctttgcctccatcgaccacaagctgtctgccgactggcgcctgaaagcggcctacacccatcgccaaagcgattccgacggcaaggtgtactacggcggcgcgggcgcgcccaacccggacggcagcggcatgacggcctggaccagccagatgaccggcacctcgaaaatggatgtggtggatttcaacctggcaggctcgtactcgctgctggggcgcgagcatgagcttatggttggctatggcgaatccgagcagcgcgattcctcgccgttccagcgctatgacgaaacaagagattacgtcaccatcaaggattggcaacacatgggcggcatccccaagtttgccgaccgcaccaccggactcaagggcgaacatggcagcaaaaaacagaaggcgggctacctcgccacacgcctgagcctgaccgaccgttttcacgccgtgctcggcagccgatacggcagttgggaaattgaaagtgtcgaacccgactacaacaccaacaaccaactgatcagttccgcaaaaaaccgccaggtccacaacgacatgtggacgccgtatgccggcctgctctacgacatcacccctgaatacaccgtatatgcgagctacaccgacatcttcaacccacaggatgaacgcaacgccagcaagaaatacctggaaccggtggtgggcagcaactacgaaatcggcctcaagggcagcctgctcaacgagcgcctgaatctggcgactgccttcttctggagcacccaggacaatgtcgccgaactcgacaactcggctgcgccagatccgaaaaccggcgaacagttctacaagtccggcggcaaaggcaacaaagtgcaaggctttgagatggaggtatcgggtgaggtcatgcaggattggaacctcacggcaggctacacctacacccactcagtgaacggcgacaagcagcggaacaacaccggccagccgttgaacctgctgaaggtgtcgacagcctaccgcttgccaggagaatggcgcgggttgacggtcggcggcgcagtgaattggcagagcgacttccatgactttgccaggcggccgaccggcgccagggatgcacagggcaacctgattaccgagcgcacccggatcacacaacaggcttacaccctggtcaacctgatgtcgcgctatcagttcgacgaaaatgtttcagcgtcgattaacgtcaacaatctatttgataaaaaatattacgagcgcgttggtttttataatggtgtttattggggagacccgcgttctatcacgcttgcattggattggaagctgtagcccccgctctgcaccgcctccaaacttaacgcatttgttaagtttggaggcgcgtcacttaagcttcgcttaatcaacccctcacataatcggccccacgagtctgatcagagagaacagacaccgatcacacttttatgggaacaccgacgatgaaactttcgactttgatgattgcaggccttatgacactgacctccgcagctgccttcgccgagggcggctcagagcgttccaaacaattctacaaggacttcaccttcgtgcaacagcaaactcacggcagcaaacaacagactgcaatggctgacggcaagagccttaagagcaatactgttgaacaaacaaatgcagagcaacaccccaacagctgatttaattttatttaatgtttagttaatccgtacaaccctgtgccatcccgctccgttggcaaaggctaacttggcgccatctaatggcgccttttttttgccttttttttattaaagcagcttgttccagaacaacatgcgcccatgctttggatcaaataccgaatcgtcaaaaccgaactttctgtacgccgactgcgccacgtcattgccttcgagcacttccagcgtgatcttgcagcagccacgctgacgggcgatttcttcgaccttctgcagcattttctggctcaaccccagccctcgaaactgattcatgaccaccacgtcgtggatgttgaccagcgggcgacaagcaaaagtcgagaacccttcgaaacaattaaccaatcccgccggttcaccgccgacgaacgccaacacactgaatgcgtgagggcgcttggccagttcagcaggcagttgctgcagcaggtccgccggcaacgcgtggccgccgcccatagggtcttcagcgtaatgattgagcaccaggcggatggcctcggcgtgcacagcgttggagtagctggcctgcagcaccaggatgtcgggggtgtccatttccttcctctataacgaccacaagggagtcagttccctttgaagtgggcgattgtaagcggggaacacacgagagatgaaggagattaacgacaaatacccgtcagaaaagacagaaagtgcgggattctcaagccccaaaacgttgcaactgcatctcttgcaaacgactcaacgtgcggcggaacgcgaacgccagatagccctcggtgtaaaggctttccaatggcacccgagcgtcgatgaacagcggtactttgcggtcgtagcattcatccaccaacgcgatgaagcgccgtacgctgtcatcgtgcaccgacaactccggcaactcgcgatcacccgccaccacgcgttccacagcatcttcggtgccacgcgcaatccgcgccggacgtttttgcgcactgaggtcaggcacatcacccagcaagatcgccttgaagcgatcacacagcagcatgaaatccatggctgccaagggttgttcgcacaggtcggcgtagcggcaccacagcagggtttcggtgcactgcacggcctcaatggaacggtagccgacactgaccggcccgctgctcaccgcctgcccctcactcaactgccggaatacagcagccagcgcctccggctggttgacccaatagcgctgcacgcctgcccccgggtgcaaacggtgatcttctccgccgtccaccgcgaccacctgcatgtttcgttcgatagcctcgatacctggcaggaagcgctcgcggttgaagccgccagcgtacagctggtcgggcggctgattggaggtacagaccatcaccacgccttgctcgaacatcacctggaacaagcggccaagaatgattgcatcgccgatgtcgctgacgaacaactcgtcgaagcacaacacccgcacgtctgcgctcaactcacgggccagggcccgcaacgggtcctgggtgcccgtgagctgaaacgagcgctgatgcacccagcccatgaagtgatgaaagtgctggcgccgcgcgggcacttgcagggtttgataaaactggtccatcagccaggtcttgccacggcctaccggaccccacaagtacacacccttgatcggcgcacgcccctggtgcaaagcctcgtggcaggcttgcagggcttcaactgcccggcgctgggcatcgtcgggcacgaagccctgctgggcgatggcatgtctgtaggccgcgaggggcgagtcgaaattcatgcagaacagtatgacttacagggaaatatccagccgtgaaatcttgccctgctcgttcaagcgaaaggtatagcgcagctccaacgggctgccgggaaagttgccggaaacgatgttgctgaccagcaccttgccggtgcgatgctgcacgttcagcacttcaacccgtggctgatagcgccgaccggtatcctccatccagcgtgcgatggcggcaggaccgacctgatgctcgccctcatcgaacacgttggcatcgtcggcaaagcagagggcaaccgcagaggtgtcgcgggcattggcggccgcgatataggcctggatggccggggccagttctgaaacggacatggcacagctccttgttttgatgatgtgtgctgccatgctaagtcagggacgtgtcagtttttgtcaggagtgaacggcccgctttcattctgctccatcagcttgcgccagcctcgcagcaggtcactgcgccgcccgggatagcgctcccccctggcgtcggcagccgcaacccggtcggtgcgaaaggtgcgataggcaccgcgcaattcgcaccaggccacgatcacccgcacctcattgagaaagcccagggccagcggccagatcaggcgctggctctgggtttggctggcgtccgcataatcgatatgcagcttggcctgatgccggatggcatcacgaaacacgttcagcggcacgcggttttccgggtaaccaaaacccggcggccccggcagcaatgtcgggttacgcagcgcttcctgggctgcggggtcgaggacatcggcaatcttggccaaggcattggcggcagcacggctcagcacgtcgtcaccccgctggtccacatagcgtaaccccagcacgatggcttcggtttcctcggcgttgagcatcaagggcggcaaaaacaaaccgctgcgcagcacataccctacgcccgcttcgccgaaaatcggtgcaccgagggcggtcaattcggcgatatcgcggtacagcgtgcgttcggacacttccagctgcgcggccaatacggccgcagtcaccgggcgttttttaccgcgcagggcctgcaacaaagtcagtagacgagtggttcgcgacacgttgatcccgccgaaaaggaaaaagtcccgcagcttagcagagcgccctgtcagaaattgtcagcatgaaaaaagcgtcttgacgaaataaatgaccaagatcatattaattacatgtcaccaaacatttaaataatctgaagtgtcgggagtcttgcatgcgcaataaagtctttggccgccgcagcggcctgcaggtatcggaactggctctgggcacgggcaatttcggcacgggttggggccatggcgccgagcgtgatgaggccaaacggattttcgatggctaccttgaagccggcggcaacttcctcgataccgccaacggctatcaatttggccaggccgaagtgctgctcggtgagttcatcgcttcggagcgtgacaacctggtggtcgccaccaagtacacactgcgcacccagccctcggatgctgacacgatcaagatcggcaacaaccgcaagaacatggtgcgtgccgtcgaagaaagcctcaagcgcttgaacacagaccacatcgacctgctctgggcccatatgagcgacaacgtcacgccgatggaagagatcctgcgcggtttcgacgacctggtacgcgccggcaagattcactatgcgggcctttccaacttccccgcatggcgcatctcccgtgccgacttgctggccgaagtgcgcagcttcgcgcccatcgtcggcgtccagctggaatacagcctggccgagcgttcagccgaccgtgaactgctgccgatggccgaagccctgggcctggccgccaccttgtggtcgccattgggcggcggcttcctcactggcaaataccgtgacagacagggtgacaaccgcgccaacaaactcggtatgttgatccacgctgaaacaagcacgcgggaaaccgccgtgctcgacgcgctgctggcggtcgccgccgagctagacacgacccccacccacgttgccatcgcctggctacgcgaaaaagcccggcgctcgaccaccgcgctgatcccgatcctcggctcgcgtacccgtgcgcaactggacgcgaccctcggcgccttgaatgtgcaactgtcagtggaacaggtcactcacctcgactcagccagcgccctaccactgggcgtgccccacggcatcatctcggagcgattccccctcgaccctggcactgacgcgccccgcccaccggttatttgagacgaaaaaaaacggccccaagggccgtttttttatgcatgacgatcaggcaaggcttttgctgaccacctcaaacacatcactcgacagctcaccggatgcacgaatgcgctcaagctcagccttcatcaacgcctggcgcgcgccatcatatttacgccagcgggtcagcggcgccagttgacgggaggcgatctgcgggttgaaaccattcaactggatcaccaggtccgccaggaagcgatagcccgagccatccgccgcatggaagttgatcaggttctgcccggcaaacgcgccgatcaatgcacgcaccttgttcgggttcttgatcgtgaacgccgagtgctccatcaacgccttgacccgttccagcccgcccggcaaggtgctgccggcctgcacgctgaaccactggtccatgaccagcgggttgtccttgaagttctcggcaaacaccgccaaagcctgggccttctcggcctcgaacggcgaattcaccagcacggccagtgcagtgaggcgctcggtcatgttgtcgctggtgtcgaactgttccagagtggcagccagcacttcaggcttggcgctgagcatcaggtacgacagcgcaatgttctgcaacgcacgccgggcaaagtgctcggcggccgccacataaggcgtgcgcttggacaaatcacggttggcggtgtagcgcagccacagtgcttcgtgcaggttgtcagccagttgcttgcgcgcgaactcgcgggccgcatggatggcatcgacgtcagccacttcgctgatttcggtcaggtaagcctcacccggcagcgacagcatttcagccaccatcgcctgatccaggcgctcgtcgctcaacacgctgcgcaaggcggtgatcaagcgctggtccagcttcagcggctggcccgcctgatgttggccgatcaactcctgcaacacctgcaccgccagttgctggccggcatcccaacggttgaagccgtcgctgtcgtgctgcatcaggaacatcagctggtcacggttgtacgggaagctcagtttcaccggcgccgagaaaccacgcagcaacgacggcaacggctgttcgttgacatcgacaaaggtgaaggtctgttcggcttcggtgaccgaaatcacccgagacgtgccaccggcgctggtttcaccggccagacgcaaggcgacaccggcgcccttcgcgtccagcaagcccaactccaccgggatcacgaacggcagtttttccaccttgtccggggtctgcgggcagctctggcggaaggtcaggctgtaggttttcgccacggcgtcgtaggactcgctgaccgccaaacgtggcgtgcccgcctggctgtaccagcgtttgaactggctcaggtcggcaccgttggcatcttccatggccttgatgaaatcgtcgcacgtcacggcttggccgtcatgacgctcaaagtacaggtcgctgcctttgcgaaagccctcggcaccgagcaaggtgtgaatcatgccgaccacttccgagcctttttcgtacacggtcagggtgtagaagttggagatctcgataaagctgtccgggcgcacggcatgggccatggggccggcgtcttcggcaaactggtgggtgcgcaggtaggccacgtcctggatacgcttgaccgtggccgagttcatatcggcagaaaagcccgaatcgcggaacaccgtgaaaccttctttgagcgacagctggaaccagtcgcggcaggtcacgcggttgcccgaccaattgtggaaatactcgtgcgccacaatcgcctcgacccgctggtgcgcggcgtcggtggcggtttcggcacgcgccagcacggcgctggagttgaagatattcaaccccttgttttccatggcgcccatgttgaagtcgttcacggccacgatcatgaagatgtcgaggtcgtactcgcggccgtaggtttcttcgtcccaacgcatggactttttcaggctggtcatggcgtgctggcacttgtcgatattttccggctcgacatagatgcgcagcgccacttcacgctccgtcatggtggtgaacgtgtcttcgacacaccacaaatcaccggccaccagcgcaaacaggtacgcgggttttttgaacggatcttcccaggtcgcccaatggcggccgtcttcaccggggccgctggcgatcgggttgccattgctcagcagtatcggatagcggtgctgctcggcgatcaccgtggtggtgaaggtgctcatcacgtccgggcggtcgaggtagtaagtgattttgcgaaagccctcggcctcgcattgggtgcagaacatgctgccggatttgtacaggccttccagcgcggtgttggtttccgggtggatcttcaccgtggtgtcgagggtgaaggtctcatttttcggctgcaccgtcaggtggttttcggtcagcttgtagtcagcggccgtcagttcctggtcggcaaggttgacgctcaacagttgaagttgctggccatccagcaccagcggcggcaggccggcaccacgctcagggttgcggcgcatcaccagctgcgcgtggaccaggctgtggtcctcgaacaactcgaaggtcaggtgcgtctcttcgatcaggtagtccggcgcctgatagtccttcaggtaaatcatcttcggctgttcggtgcgcatggcttcgtccttttactgatgcacggcgagctggtaggccgtgtatttacgaatattgataacgccggtgtcgaagatcaggtattggcccttgatccccagcagcgtgccttcggcaatcgggttcttgtccaggttgaagctgacaatcttcgtgggatattgctctaccgggtagcgaatttcgatcggttcaatgtcggttaccggttggatggcctgcaggccaaagcgttcctgcaaaccgagcaagccttcggcacaggacgcgaacagctcgtcgcgcacttgcttgaggtcgacggcctcggcatcgcccttgagcaacgcacgccagttggtcttgtccgccacctggctgcgaaacaggtcttcgacgaaacccgattgctggcgcgtggccacgcgcatgatcggcaacgcctggctcgcgccctggtcaagccagcgggtcggcaactgagtggcgcgggtaatcccgaccttgatgcccgacgaattggccaggtacaccacgtggtcggtcatgcagaatttttcgccccagcccggatcacggcacgtaccggcgtcgtaatggcaacgctcagggctcatgatgcacaggtcgcactgggccagtttagtcatgcacgggtagcaataaccctggctgaaactggttttggtcttgcggccacagtggctgcaatggatggcaccgagatactccaggcgcacatgcgtgccgatcaacgggttgaccggcacttcagtatcgcccaggcgaaacgcgtattgaaccgtcggctcaccgagctgcgccgacattttgttgactgcaccgcgaccgatttcaatcaatggatcgcatccgacttgaacaggatgttcggcaccggtgccgatttcgacgcgcattcctgcgggcccatgtagccggtgcgctggtcttccggcaggttctggatttcccaggcgatcaccgcttgcagcgacagttcgcgctgctcggcagtgagcttgcggccatcggaccatttaccgatttccaccgcgagcttgaggctctcgtagatgtcaggggtgatgttttcaatcatttcagcaaaagaggacataaggctcttcctatctcaaagtgaggctttgcggcggttgtacaacccgcccagcaaacccgtcaggcaaccgatgaccaagccgctcacgtgagccgcgttggcgatttcgccgaaaccgatcatcgagatcagccccgacatgcagagcaccagccagatcagcatcatcgccagcacgccacggggcaggcgatacgccgggttgggcgacaataactggaaaatccagcagtgcccgagcagaccgtacaacacgccggacaagccgccaaacaggctcgggccgccataagcgtattgcgaatagttggaaaccaggctgaacaacagcgtcaggccgagcaggttgatgctgccctggcgcacttcaatgcgccgccccagctcccaataccacatgccgttcatggccaggtgcaggatgccgaagtgaatcaacatgggcgtgaccagccgccaccactgccccgacgccaggctgtccgccagcggcgtgaactggatgtactcgcccgccacgtgaaagggcaaaaaggttagccaggccatggtttgcaggttttcaccgagcaaggtcaccgcgccgacgatgatgctcgccagcagcaccaacgccgtcaccgggctgtggcgcacttgctgggcaaagccgggccgcgtaaccggtgcctgctcaggaatatccagttgctggtccgggtcgcctgcgggaaaacgctggtacaacacccgcacgtcgtcgctgatggtttcaggcacccacaagacttgctccccggcttcttcactgacgcgatggggcacttgcatgcgttgcaacagtttgacgaaacccgccaggtcgacgctcaaaggcaagcgtaatacagccacggtagtcatttaataacctcaggccgctcaacgtcgacccatacaaatttacgcggatcgaggcgggtttcctgatccagtcggtacgccaccagcttgccgtacagcactgcgctgtagtccaggcaggccaggttgtcgcggatcggcgccggtttgccgctgcgccagtaatggccgacgaacagcaatggctcgtcgacgccatagcgcagtagggaattcttttgggtggatgacagcggcgtacgcgccaccggctccggcaaggcatcgggctggaacacaatatcgccgtaggttttcgggtcatcttcccagaatttggtgcggaagaacgaacgcgtcaggccatcgccacccgtcagtgtcaggccatccggcaggcgcatgtcggtgccgcgcagcaagcggtcgaaagcgttgcaggcaaaactgcccggcacagcggcggcttgcaggaagtgcgggtcgatacagccgtccgggaaagtagtgcgtagcggcccgataaagccatcgtcccagcaggcatgcaccacacggaaacgcccgacgtcgacaaacagcggcatgtcatagaaccagccgaggaagtcgtgccagtcggccgggtgctgctcgaattgggtcagggtttcctgaatcaagcgcgcatgccgagggttgtgctcacgcacaaactgcttgccactgcccggcggcgcgggcgtggtccagcccagtgcattgaactcatggttgcccatgatgcacaacgcctgacccgccacaaccatgtcatggacgatatgcagcgcctcgcggatgcgtggcccacggtcgatgatatcgcccaggaacaccgccatgcgcgtcggatgccgccaggtgccgcccctcttgtggtaacccaactgttcgagcaagtgctcaagggtatgagcgcaaccgtgcacgtcaccaatcaggtcgtagctacgcgcgggatcgagcatcagtcgcctccaccccccaagcggctgccccagcccagcttggtgcggcacacttcatagtagttgtggtccagcgggtggataagccgcagcttctgcgcctttttgctcacggtgatggtgtcaccgggggcgcaggtgaaatggttctgcccgtcgcaggagacttgcgggtaaatctgcatgtctttggacaccacgattttcagctcactgttgccatcgaccacaatgggccggctggacaacatatgggggtacatcggcacgatcacaatggcatccagcttgggatgcatgatcgggccacccgccgacagcgcgtaggccgtggaaccggtcggcgtggcgacgatcaggccgtcggccttctggctgcacacgaactggccatcgatatacaactcgaactcgatcatccgcgtggacttgccggggtgcagcaccacgtcgttcaacgcgtcgccctggccgatggcttcgccgtggcggcgcacttcggcttgcagcaggaagcggttttccaccaggtaatggccgtcgagcaccttggccacttcgacttccagctcatccgggcggatatccgtcagaaaacccaggctgccgcggttgatccccagcaccggcacgttatgccgcgccagcgcacgggcggcacccagcaggctaccgtcgccaccgaccacaatcaccatgtcacacacttcgccgagcatcttgcgcgacgaggtctgcaagccatggcccggcaggatttcggcaatggtgtcttcgaggatcacgtgcaggtggcgttccagcaggaattttttcagccggcggacggtgtccagcacctgggtactgcccaggcgaccgataatgccgatattgcgaaattgctccatggggctcctgcgggatttggggtgtggcaaaaagaacgattatgggcgaaaggccgcgccaggcaaaaccctttgtcgtcgccaagccccgatgacaatggttctcacgcacccgcagggcggttaaaaggctatgctcggaccatgactgtgttccccgatttgcatcacctgccccgccaattgcgccaccccgaggtgcgcgacctggcgtgggtgatactcgccccgccgatgctcctgcaaacgccttggccgcagcgccatcccttggccggcagcgattgggtgcaggcgccgcatcttctcgaacattggttacgcacactcgatcacgacagcagcccgttgcagcagtggctgagcctggcgcgcacccgccgcctgggcctgtattacgagcgcctgtggcagttcgcggtgcaacacgcgcccggtgtggaattgctggccgccaacctgccgatccgccgtgccgggcataccctgggtgaattggacatgctgctgcgtgaccgagacggcgtgcaccacctggaactggcgatcaaactctacctcgggccgcagcacgcaaatggccacgacagcgcgcagtggctgggcccgggttgccatgaccggctggaccgcaagctggcccatctggctcagcaccaactgccgatttcggcacgcccggaaagccgcgaagtgctggcggcgctggatatccagcaattcgatgcacatttgtggctgggcgggtatttgctctacccgtggccgggccaggccgaagcgcccgacggcgcccacccgcagcacttgcgtgggcgctggctgcatcagcgcgactggcgggactttgtcagcctcagcccgcccggccgctggcaacccctgccccggcacgcgtggctggcgccggcgcattacccggccgatgaggtgtggagcgaaacacagatgcacgcctggctggcggagctggacccgatggcaccggcgcaactgttggtgcggctggttcaggtgggtgaggattgggaagaagccgaacggctgtttctggtggcggatctttggccgaatgtgccaggggctggctgacagattttggctgtctttcaggcctcatcgcaggcaagccagctcccacactttatgtgggagctggcttgcctgcgatagcaatcgcctagacgctacaagccatcgatatgccgataatccagctgcaacccgaccgccagcgcttcggcccggcccaacctgatcggcccgcgctcgatatccaccagcaaccccgggcactccagcggccgcaacccggcaatatccttcagtcgcccgtcagtaatcaccagcaaccgctgctgctcactcggataacgcttgcgccgcacgcccagccaatgccccgcctcggtcagcgctgccagcaacggcgtaccaccgcccgcccccaattgcgccaaccagcctgccagccctttggcagctttcaggccctgaacctgccatttcggcgactgcccgctggccgtcaacaacgccatgcgcgcccgttggcggtacgcgtcatcaaacagctgggccaataaccccttggcgtcggtcaatgcgcgatggcgccgcgtcgaggccgatgcgtcgacaatcaccagccacagttcatgggccgtgcggctgcgcagttgataacgcaggtctgcacgcgttgtcggccggccacccagcagggtacccggccaattgatcacgccgtgtttcgcactgcgcgccttgccgttgcgcccgctgtccattcgccccgccttgggccgggcatccgcccccgcgtcaggtcgagggcggatgcctagggcttttttggccaggcaggtacatcccggcgggtgcctgtgggcaaggcgggtgcaggcctgtcgccccactggccttggcccggtgaagtatcggaagacttgggcgactgtccgtcgttcggcgggctgcccggcggcgattgctgctgccgacggtgacgcaacgcaaattcggccacggcttcgatatcgtgctcagcaatcgcattggcaccgcgccacgccgcatgggcgcgtgcgccgcgcagccagaccaggtctgcgcgcaggccatcgaccccggcagcgaaacaacgctcggtgatctgtgccaacgcctggtcatccagctcaatgctgtcgagccgtgcccgtgcctgggtgcagcgctcgcgcaaggcggcctgctgctcggcccattgcatgcagaacgccgcaggatcactgtcgaaatccaggcgacgacggatgatctggccgcgctcggccggcaaggtttggccactcaaggccacattgaagccgaaacggtcgagtagctgagggcgcaactcaccctcctccgggttcatggtgccgatcaagacaaagcgcgcggagtgccgatgggaaataccatcgcgttcgatcaggttggtgccactggccgcgacgtccagcagcaggtcgaccaagtgatcgggcaacaaattgacttcatcgacgtacagcacgcccccgtccgccttggccagcacgccgggagaaaactgcgcacggccttcacccagcgccgcatccagatccagcgtgcccaccagccgctcttcggtagcccccaaaggcaaggtgatgaattgaccgctggccagcaggtctgccagcccccgcgccaacgtggacttggccatgccacgcggaccttcgatcagcacgccgccgatcttcgggtcgatggccgtcaggcacagcgccagtttcaaatcgtcggcgccgaccacggcggacagcgggaaatggggaatatcagtcatcagccgtcttcttctatatccagcaacaggttttccaacgcgtccttatagggccccggttcctcccacatgccgcgctgctgggcttcgagcatgcgttcggtcatgtcgcgcaaggcgtcggggttgtgctgctgcacgaaagcccgggtgtcggggtccagcaggtaggcgtcggcgagcaaggcgtattggtgatcatcaatcagcgcggtggtggcatcgaaagcaaacaggttgtccacggtcgccgccatttcgaaggcgcctttgtagccatgtcgtttcacgccctcaatccacttggggttggccgcccgggaacggataacccggttcagctcttcctttaaggtgcggattttcggcaaatccggctggctatggtcgccatgatagctggcggccttgtcgccgctcagggtttccacggcggcgagcatgccgccctggaattggtagtagtcgttagaatcgagcacgtcgtgctcgcggttgtcctggttttgcagcaccgcctgaacctggctcaggcgctgggcgaactgttcgcgagcggcggtgccttcgtcggaaccgccataggcgtagccgccccagttcaaataaacctcggccaagtcttcgcggctctgccacaggcggccgtcgattgcgccctgcacacccgcaccataggcgccgggcttggcgccgaaaatacgccagccggcctgcttcgctgccgcctcttcgtccaggccggacttgagcaacgcctcacgctcactgcgtaccttggctgccagcgggttcatatcgtctggctcatccagcgccgccacggcctgcactgccgcatcaaacaggcggatcaggttggcaaacgcatcgcggaaaaaacctgatacacgcaaggtcacgtcgacacgcggccggtccagcaagctgatcggcagaatctcgaagtcatccacccgctggctgcccgtggcccataccgggcgcacgcccatcagcgccatggcctgggcgatgtcgtcaccgccggtgcgcatggtggcggtgccccacaccgacaggcccagctggcgcagatggtcgccgtggtattgcaaatgccgctcaagtatcaggttggccgactgaaaaccaatccgccacgccgtggtggtgggcaggttgcgcacgtccaccgtaaagaaattgcgcccggtgggcagcacgtccaggcgcccgcgactcggtgcgccgctcggcccggccggcacaaagcgcccgctcagggcatccagcagaccgcgcatttccgccgggccgcaggcgtccaggcgcggcgccacgacgatgcgcaggctttcgatcaccgccttcacgtcttcccagccgggctcttccaactgctcaagcggcccttccagtgcttgctcgatcaaacgcccggcatacagttcaaggcgctcgcgggtatcaccggcggtgcgccacagttgcgcatcaattttctgcaaaacctcagggcggcgcccggtccagggttcggcgagggcgcagtccagtggatcaaagcccagctcgaaggccttggcgatcacacgcagcaagctcgattgcgggccgcgcccatcgccacgcgggatgcgcagcaaggccagcagcgtatcgatgcgcaaacggccctcgggcgactcgccgaaaatgtgcaggccgtcgcgaatctgcgattccttcaggtcacacaaataggtgtccagacgcggcagccagatcgcggcgtcggcctcgctgtccatctcaagctcttgatcgatgcgggtttcgcgcaccagtttgagaatgtctttttgcagctccagggcgcgtcttgggtcgagcaattgcgcttcgtaatactcgtccgccaacagctccaggttacgcagcgggccgtaggtttcagcgcgggtcagcggcggcatcaaatgatcgatgatcaccgcctgggtgcggcgcttggcctgcgcgccctcgcccgggtcattgacgataaacgggtaaatgttcggcagcggcccgagcagcgcgtccggccagcagttttgcgacagaccgacgcccttgcctggcagccattccaggttgccatgcttgccgacgtggatcacaccgtgggcgccgtaggtgtggcgcagccagaaatagaacgccagatagccatggggcggcaccaggtcggggtcgtgatacaccgcgctggcgtccacctgataaccacgtgccggctggatgccgacaaaggtcaggcccaggcgcaagccggcgatcatcaagcggccatcgcggtacatcgggtcgctctgcggtgtgccccaacgcgccagcacggcctgacggttgggttcgggcaagcgattgaacatcgcctcgtagtcgtccagggccaggctttggtggcacgggcgctggtcgaggctgtccaggtcattggtcacgccaccgagcaaatcgtggatcagcgcagtaccgctggccggcaattcactcggcaccggataaccttcggcctgcagggcacgcaggatattcagcgccgccgccggcgtatccaggcccacgccgttgccgatacggccgtcgcgagtcgggtagttggcaaggatcagcgcgatgcgcttgtgcgcattcggcacccgcgccaactcaacccagcgccgcgccagctcggcgacgaaatccatgcgttcgggcgccgcgcggtagcagaccacgtccgattggctgcgctcgctgcgccaggccaggtctttgaaactgatcgggcggctgatgatgcgcccgtccagctccggcaaggcgatgtgcatggcgaggtcgcgcgggccaaggccttgttcgctggcctgccagccgggctcgttgtcttgggcgcaaatcgcctggattaccggaatattgcggcgaaacggccgcaggtgcggcgcttcagggctcgattgggcgaagccggtggtattcagaatcaccgccgcctgcacgtcatccagccaatcctcgaccaccgccaggcagccgggctccttcaagctggccaccgcaatcggcagcgggttaaggcctgctgcctgcaagcgctggcagaacacatcgatgaaacccgtattggccgcctgcaaatgcgaccggtagaacagcaccgccgcgacaggaaaccccgggttccagtccgcctgccaatcattcaggcgggcattgccgttgtgcgggtgataaatcgctgtgcgcggcagggtttgcggctcagcccagacgtaatcgcggcctaaaaaaccgctggccaggcagcgatagaacgccagggcattgcccatcccgccctgacgcaggaaatgccacaggcggtcgcgcacctccacgcccacggtgctcaggctgctgagttccgggtccgggcgatcatcccccggcaccagaatcaactgcacgccgcgttccgccaactccaccaaacgctcgatgccgtaacgccaataaccaatgccgccatgcagcgaaatcaggatgaccttggcgtggcgcaagacctcatcgacatacaggtcgaccgaggcatggttctgcacctgcatcgggttggccaaacgaaagctggggtaatcgtcgggtaactgccgggcggcttcggccagcagcgccaggctggaatcgccgctgcacaggatcaccagctcggcgggcgtttggccaaggtcggcaatattgtcgtccgagacgaaaccaccgggctgagtcctgagcaggtgcatgggttaaacgctgagggcagcgcgcagttgcgcttcaaggcccgctgcgtccagctcctggccgatcagcaccaggcgcgtgatgcgcgcttcgtcagcgccccaggcacggtcgaagtgcttgtcgaaacgcgtgcccacgccttggatcagcaagcgcatcggcttgttcgggatcgccgcgaagcctttgacgcgcaggatgccgtgctgcaccaccaactgagtcagggcgtcgagaagcagcgcttcgtcggtttgcggcaagtcgatggaaatcgaatcgaaagcatcgtgatcgtgatcatcctcaccctcgtggtgatgatcgtgatggctgtggcggccgtcgatgtgttcttcggaaccggcgcccaggccgatcagcacgtccagcggcaggcgaccgctgctggcttcaatgactttcaccgctggcggcagctcttcggcgacttccaggcgcacgcgggccaggtcttcggggctgatcagatcggatttattgaggatgaccaggtcggcgctggccagttggtcggcgaacaactcgtgcagcggcgattcatggtccaggttcgggtcgagtttgcgctgggcgtcaacctggtccgggaatgcggcaaacgtaccggcagccacagcagggctgtcgaccacggtgatcaccgcatcaaccgtgcaggcgctgcggatttccggccactggaaggcttgtaccaacggctttggcagagccagacccgaggtttcgatcaggatatggtcgagatcaccgcgacgggccaccagctcgcgcatcaccgggaagaactcttcctgcacggtgcagcacaggcagccgttggccaactcgtacacgcgaccattggcttcttcttcggtgcagccgatggagcactgcttgaggatttcgccatcaatgcccaactcgccgaactcgttgacgatcaccgcaatgcgacggccctgggcgttgtcgagcatatggcgcagcaaggtggttttgcccgaaccgagaaagccggtaacgatggtgacggggagtttggccagtgttttcatcggatgccctttggggcgggcatacgggacgacaagccctgcggcggcgcgcagaggctgatttcgtcaccggatcaccccgcccggttgaagtggaaaatcggttgcgaggcaggtctcctggcttggggcttgcaggtcttgcgaccggcgctggctgcgccttcccgccgatttggcagtggcgtggcagtcagatgaaccctttacagttgcgggggcagccgcggcttggaccgcgttcccttcttagcttcggcctgggccgaagaacctcgagggtgcaaggctacgcagtgcttgggggatggtcaatgacggggtttgggttcgggtacatatccattatttgggtgatggccacttatggttccgctcttacagcgggtcacttttggaagagcgccaaaagtaaccaaaaacgcttcgccccaccactcggcacctcgcttaggctcggtgtgcccgcacgcaggcttgaatccgtgggccgccgccatgggccatccctggcccatcgcggctaacccggcgtcctgccgggttacccacggattcaagcctgcgtgcggccagcgtggttaacggggcgcctcagatcaagatcaagatctaaagcacggcggcctgacagccgacctgagtggtgtgaagcaaaaacggtccagtgtgggagctggcttgcctgcgatgcaaacaactcggtacatcaggcatatccggttgatgccatcgcagcggtgcggcgatccgacaagctcgctcaccacagggtacttatcgcctgctctacctaaagacctcgaaagggctgactgtaagagcggaaccaatatcagcaacccccaaataacggatatgtacccagatccgaattgactcccctcccacccccatgctctcctacacaccttgtttcgggtgccctgcaaagggtgaaacgggaaaccggtgcgtcatagcgatatgaccagtccggtgctgcccccgcaacggtaagcgagcgaagtatcacagccactgtgcgaatgcatgggaaggcgatgctttcaggactctttccaagagccccctcgcaagcccggagaccggcccgaaaaatcagataacaaacccgcggtgggcgggcgctgttcgaaccctgcgtgcccggctcgcagggttttcatgcgcctgcgtcaccctgaaacctgaagggacgcgccatgtcgatcatcagcagcacctcgcacaccgccagcagcacctccaccctgagccaacgcctgaccgccgccatcggcgcgtcgatcctcggcgcgtgcctggtgtatttcgccggcttctcgcatatcgaggcggtgcacaacgccgcccacgatacccgccacagcgccgcgttcccgtgccactgagacctgccgacatgatcaagcgtatcgcccaaaccgcagggttcaccggcctgttggccgccctgctgctgaccctgctgcagagcttctgggttgccccgctgattttgcaggcggaaacctttgaaaacgcctcgcccgctgtcgaagtcgcccatgaacacgccgaaggtgcggctgcgcacactcacgatgccgaagcctgggagcccgaagatggctggcagcgcgtgctgtccaccaccggcggtaatttggtggtggccgtggggtttgcgctgatgttggccggcctctacaccttgcgcgcgccgacccgcaccgctcagggcttgctgtggggcctggccggttacgcaacgttcgtactcgcgccaaccctgggcctgccaccggagttgccgggcaccgccgccgccgacttggcccagcgccagatctggtggatcggcaccgcagcgtcgactgccgccggcattgcgttgttggtgtttggtcgcaactggctgctgaagattttgggcctggcgattctggccgtgccgcatgtgatcggggcgccgcagccagaagtgcattcgatgctggcaccggaggctctggaagcgcagttcaaaatcgcctcgcaactgaccaacgtggcgttctggctggccctgggcctgatcagcgcctggctgtttcgccgtaaccgcgatggccaatactcggcatgaccctggtcgtcggcctgggttgccagcagggctgtgacgttcacaccctgctggcgctgtttgatgccgccctcgccgaggggggcatcaaatgcaaagacatcaccgccttggccagtattgatcacaaaaaagatgagccaggattacttgccctggcccaacggctgaacctgccttttgaatgtttcagcgccgagcaactcgctccctacgaagcttgcctgagccataaatccgacgtggctttcgcccatacaggctgttacggcatcgccgaaagcgctgcattggccctcgccgaacagctcggcaatgcaccttcccgcctgctgattacccgcaaaaaaaccgcccaggccacctttgcattggcgtgcgccagctaaaatcccgataatcagcgcgctcgatcatgagcaatcttcatgctcgcccgtttttcgacaggaatccccatgaccgtctacttcatcggcgccggccccggcgacccggaattgatcaccgtcaaaggccagcagctgatccgcagttgcccggtgatcatctatgccggctcgctggtaccagcagcggtattggaaggccatcaggcgcaacacgtggtcaacagcgccgaactgcatttggagcagatcatcgacctggtcaaggccgcccacgccaagggccaggatgtggcgcgcgtgcattcgggtgacccaagtctgtatggggcgattggcgagcaaatccgtcatcttcgcgagctgggcattccgttccagatcatccccggcgtcacggcagtagcggcttgcgccgcactgctggaaaccgaactgaccctgccggacatcgcccaaagcgtgatcctgacccgttatgcggataaaaccagcatgccgcccggcgaggatttcgacggcctggcgcgccacggcactaccatggcgattcatttgggggtcaaccatttggaaaagatcgttgccgagttgctgccgcactatggcgcggattgcccgattgccgtggtgcaccgggcgacgtggccggatcaggattttgcgaccggcacgctgacggatatcgcagaaaaggtggcggccaaagggtttcggcgcacggcgttgatcatagtgggccgggtgttggcggacgacagcttcagtgagtcttcgctgtatcgggccggtcatgcgcacctctatcggccttgagcaagtactgaagtcaaggcaataccctgtgggagccgggcttgcccgcgatgacggtggttcagccgactcattcgtcagctgacacatcgctatcgcaggcaagccagctcccacagttgatctgttttgttagattaattgtgtaacacattgaatttaaggcataaaaaaacggcgctcacggggcgccgtttttttgttcgcagtgaacgccttactcagtagtaggcgttttctttctgcgtatggtcggtcacgtcgcgtacgcccttgagctccgggatacgctcgagcaaggtgcgctcgatgccttcgcgcaaggtcacgtccgcctggccgcagccctggcagccgccgccgaacttcaatacagcaataccgtcttccactacgtcgatcaggctgacctggccgccatggctggccagccccgggttgatctcggtttgcaggtagtaattgatgcgctcgttgaccgggctgtcagcgttgacgttcggcaccttggcgtttggcgccttgatggtcaactggccgcccatgcgatcagtggcgtagtcgaccaccgcatcgtcgaggaaggcttcgctgaagttgtcgatgtacgcagtgaagcttttcagccccagggcggtgtcttcaggcttctcttcgccgggcttgcagtaggcaatgcacgtctcggcgtactgggtgccgggctgggtgataaagacgcggatgccgatacccggggtgttctgcttggacagcaggtcagccaggtaatcgtgggcggcgtcggtaatggttatggcagtcatggaaactcctcacaggcttgccggcagtttacgccaaaatattacgcaggtacaaagtccgagtaattttgtcggaaaagactttgccgcccgatcagaggttttcatagcgattcatgtccagcacgccctcttccaccggtgtggtttcgcggatgtattgcgacaagtcatggaaatactgccagaacaacggatggctgcgacggatgccccagcggtcgacgatcttctcaaaacgcttggcatccttggcattctccatcgccgccacgaactcgggcacttcctgcgccgggatgttgaacatgaagttcgggtagctgctcagcacgcccgggtagatggtcaccgtatccaggccgggctgatagcgataagcctcgcccagcagaaacgccacattactgtgtgcccggttgcgcaacatgctgtaaaccacgcgtttgccgctggtggtttcgatacgcagcatcgtggcttcaggcaactggtcaatcaccttgagccccgccgccgggcgtgaggtcaggcggctcagtgcctgctccgcatcctgcaacgccgggtcaatgccgtcgcgtgagcaataggccccggtgcagcggttgatcgggtccgggctggcgttcaaatcgccgtaacgggtcaggagctggttggcgaagtcacgtttcgggtctttttcgtccagatgcaaaccgcttggcttgtcgtcatcgatggcttcgtagtccagccacagcttgagcttgccactgttctggtaccagtcatccataaagtcgtcgcgggtatcggccggcatcaaacgcaggaagttctgctcggcgccattgcggatcaggtcgaaatacaggcgggtctgggcctggtgcgacacgttgccgaacacgtcgaaattcaccgccaactggtaataggtgcgctcaagcaacggatagtcgaacagccacatcgtctgcggcacttcaccgatcaggcccttggtcaccgaagcgctgtcaaagtggcggaagatactcagcagggcattgtcattgccggcccacagggtcgaccagctcggtggcggcaagtcggcgtagttgtcgcggcgcagggcttcgtattggttgcgcttgtcgcgataggccagccacaggctcagcacgctgcccacgtcatcgttctgccccggcatggccaacaaaggcgtggcctggccgcgatagcgggcgtcggtgatgtacaggtcatgctcggggtcctggaacagagtccagaagttgtcgcggatcacatccgtggcaatctgcccacggcacaccggcccccgaataaaggtgcgcacgaagtattcagcgttatccagcatgaactggtaacgcgccttggccggaatggcttcaaaggtggcgaacgggttggcgcggctgcccggcccgtagccgggcaaggcattgacctgccaattatcggcgtagaacagttccttgacccgcgccattttcgctgcgctgaacggataggtgatgtgggttttatgcacgatcgccccctgcaccggccacaggcggtaatacacctgggtgccggggtcgtcattggggcggcgggtagcgatcaggtcaatcggctggccgctcggcgtgcgtgagcgtacccactggaaataatgcccgggctcgccgttttcaaaatagatatgggccaggaacaaatgctcgaacaaccagcgcgccaccaggctttcgcgggcgccgggccggttgaacaggttttcccattgctgcacctgcaacgcctctttcgcactgggcgccaggccttgctcgtcgataggtgcaccggacgccagccagcgctgcagcgtctgatattgctggtcagtcaggccggtcacggccagcggcatgccttccttcggatggctaccggcgtaggcattgaattcgccgggcatggcgcacatattttcgcggttcaggcccagcacgatgtcatcgggcaacttggcgttgggctgcaatggcgcgttgtggcccagctccagcatgcgtgccatcaacgcggcctggctgccctgggcgtccagcaccgagtagaaacctttctgctgccaggcttgcttgccaaaggcgtcatagaacaagcgcgtggtgggtgtggcctggctgcgctcgccgtcgtagaccggcactttgcttgcgccccgggccgcgccttcggcactccccaggttcaactggcaagccgagtcgtaacaggcatggcacgccacgcacttctcggtaaaaatcggctgaatgtcgcgggtataagaaatcgcgggagcaggactttgcgcctgagtgctactggcaatcagcaacagcaccgcgctgacgataagacgaaatgacatgtacccggtcccgattcaatgcgtgcgctgaaaaattgccggtgattctaccgggccatggcctgcaacaacatgaacgatattcatgcaaacgctgcacatactctaaatcggcacaggtttgctatgattctccccctccgaaatgcctgaccagagtagtcccatgcccgatcgtagcgctcgtctgcacgcccttcaccaagccctcaaggaacgcatcctgatcctcgacggcggcatgggcacgatgatccagagctacaagcttgaggaaaacgactaccgtggcaaacgcttcgccgactggccaagcgacgtcaagggcaacaacgacctgctggtgatcacccgccctgacgtgatcggcggcatcgaaaaagcctacctggatgccggtgccgacatcctcgaaaccaacaccttcaacgccacgcgcatttccatggccgactacggcatggaagagctcgcctacgaattaaacgtagaaggcgcgcggctggcgcgcaagatcgccgacgccaagaccctggaaaacccggccaagccgcgctttgtcgccggcgtgctcggcccgaccagccgtacctgctcgctgtccccggacgtgaacaaccccggctaccgcaacgtgaccttcgatgagctggtggaaaactacaccgaggccacccaaggcctgatcgaaggcggcgccgacctgatcctgatcgaaaccatcttcgacaccctcaacgccaaggcggcgatcttcgccgtgcaaggcgtgttcgaagagctgaacatcgaactgccgatcatgatctccggcaccatcaccgatgcctccggccgcaccctgtcgggccagaccaccgaagcgttctggaactcggtagcccacgccaagccgatttcggtcggcctaaactgcgccctgggtgcgagcgaactgcgtccgtatctggaagaattgtcgaacaaggccaacacccacgtgtccgcgcacccgaacgccggcctgcccaacgaattcggcgagtacgacgagctgccgtcgcaaaccgccaaggtcatcgaagagttcgcccagagcggcttcctcaacatcgtcggcggctgctgcggcaccacgccgggccacatcgaagccatcgccaaggccgtggccggctatgcgccgcgcgtgatcccggacattccgaaggcctgccgcctgtcgggcctggagccgttcaccattgatcgcagctcgctgttcgtcaacgtcggcgagcgtaccaacatcaccggttccgccaagttcgcccggctgatccgtgaagacaactacaccgaagccctcgaagtcgccctgcagcaggtggaagccggcgctcaggtgatcgacatcaacatggacgaagggatgctggattcgaagaaggccatggtgaccttcctcaatctgattgccggcgagccggacatctcccgcgtgccgatcatgatcgactcctccaaatgggacgtgatcgaggccggcctcaagtgcatccagggcaagggcatcgtcaactcgatcagcatgaaagaaggcgtggagcagttcatccaccacgccaagctgtgcaaacgctacggcgccgccgtggtggtgatggcgttcgacgaagccggccaggccgacaccgaagcgcgcaagaaagaaatctgcaaacgctcctacgacatcctggtgaacgaagtcggcttcccgccggaagacatcatcttcgacccgaacatctttgcggtcgccaccggtatcgaagagcacaacaactacgcggtcgacttcatcaacgcctgcgcctacatccgcgacgagctgccgtatgcactgacttccggtggcgtgtccaacgtgtcgttctcgttccgcggcaacaacccggtgcgtgaggcgatccactcggtattcctgctgtatgcgatccgcaacggcctgaccatgggcatcgtcaacgccggccaactggagatctacgaccagatcccggccgagctgcgcgacgccgtggaagacgtggtgctcaaccgcacgccggaaggcaccgacgccctcctcgccatcgccgacaagtacaaaggcgacggcagcgtcaaggaagccgaaaccgaagagtggcgcggctgggacgtgaacaagcgcctggagcacgcactggtcaagggcatcaccacccacattgtcgaagacaccgaagaatcgcggctgtcgttcgcgcgcccgatcgaagtgatcgaaggcccgctgatgtccggcatgaacatcgttggcgacctgtttggcgccggcaaaatgttcctgcctcaggtggttaagtcggcccgtgtaatgaagcaggccgtggcccacttgattccgttcatcgagctggaaaagggcgacaaacccgaagccaagggcaagatcctgatggccaccgtgaaaggcgacgtgcacgacatcggcaagaacattgtcggcgtggtgttgggctgcaacggctatgacattgtcgacttgggtgtgatggtaccggcggaaaaaatcctgcaagtggccaaggagcagaaatgcgacatcatcgggctgtccggcctgatcacgccgtctctcgacgaaatggtgcacgtggcccgcgaaatgcagcgccaggacttccacttgccgctgatgatcggtggcgccaccacctctaaggcgcacacggcggtgaagatcgagcccaaatacagcaacgatgcagtggtgtacgtcaccgacgcctcgcgcgcggtgggtgtggcgacgcagttgttgtccaaggaactgaaagccggctttgtcgagcgcacccgcgaggagtacgtggaagtgcgcgagcgcaccgccaaccgcagcgcccgtaccgaacgcctgagctacccggccgccatcgccaagaagccgcaattcgactggagcacctacaccccggtaacgccgacgtttaccggcgccaaagtgctggacaatatcgacctcaaggtgctggccgagtatatcgactggacaccgttctttatttcctgggacctggcgggcaaattcccgcgcatcctgaccgacgaagtggtcggcgaagcggcgacttcgctgtacgccgacgcccaggaaatgctcgccaaactgattgacgagaaactcatcagcgcccgcgcggtgttcggtttctggccggccaaccaggtcaaggacgatgacctggaagtctacggcgaagacggcaagcccctggcgaccctgcatcacttgcgccagcagattatcaagaccgacggcaagccgaacttctccctggccgacttcgtcgcgccaaaagacagcggcgtgaccgactacgtgggtggtttcatcaccaccgccggcatcggtgccgaagaagtggccaaggcctaccaggacgcgggcgacgactacaactcgatcatggtcaaggccctggccgaccgcctggccgaagcctgcgccgagtggctgcaccagcaagtgcgtaaagactactggggctatgccaaggacgaagacttggacaacgaagcgctgatcaaggagcagtacagcggcatccgccctgcccccggttacccggcgtgcccggatcacaccgagaaaggcaccttgttccagctgctcgacccccaggcccgtgaaatggaagccggccgcagcggcgtgttcctcaccgaacactacgcgatgttcccggctgccgccgtcagtggctggtacttcgcccacccgcaagcgcaatactttgccgtgggtaaaatcgacaaggaccaagtggccagctacaccgcacgcaaaggccaggacctgagcgtaaccgaacgctggctggcgcccaacctcggctacgacaactgatcggccgcaacgccggtcaaactgtgggagctggcttgcctgcgatagcggtctttcagttgatggaaatatcggctgatacaccgctttcgcaggcaagccagctcccacattggtttcgtggcgtttggactatgcttcccccaggcacattgttctgagggacgtatggacgatccagccaacaacaagccccccaccttctggcagatgctgcacagcgtcatggctgccgcctttggcgtgcagagcggcaaaaaccgcgcgcgcgacttcacccacggcaagcccagccactttgtagtcctgggcattttgttcacggcggtgtttgccctgacgttgttcggcatcgtcaagctggtgctgttgctggcgggcgtttagtgcagcagcaggtgcagactgaacgggtaacggtaggacgcaggcttgccgacggcggagagtgcgcgaaaatccacgggcggtgtcggccccaacaattgctgcgcctgcgcagcgtcgatcagctggaataacgcttcctgacaatcacgcccgccgtaggcgccgatatccacgcccttggcgtcatcgttgatcaacaccaacgcccagccgcccagggtgaaatgcccggcgaccagcgtggtcagccgcccgtccaggcgcgcgttcaaggcggccgcagagctgttggccgcgctgaacaacacatccttgcccggcacacgcccactgtcttgcagggcctgtatggcgcccagcgccatttcatcattggccgaccacaccagcgccgtctgcgggtagcgcttgaacagttgcgtggcctgctcgaatgcgcgctggcggctccactcgccgtaaaccagctgacgcaagcgcacttgcgggtgttccgccagggcacggtgcaagccctgctcgcgcagctgtgagacgggggtatttttcgcgccggaaaacgccagcaaatcgatggtcgcgccgggcgcaaccgggccgtgctggcgcaacagatcagagagcatcaggtagccggcctgctcgtcatcggccaccaggctgccgatccagttggtgtcgcggtgggcatcgagcagttgcacctgatcgggcgtcaggctgttgttcaccatcagcagcttgaccccgctcccccgggccatgcgcaggatctgcggcgccacgtactcttcgttgaccagcaccaggtagtccggccgctcgttgccttgcagcacttcccgcgcctgattcaccgtgttttggccatcacgctcggaataacgcacacgcaaatccaggccgaggtccttggccgcggcctgcatgaattgcgtgtagctgacccagaaggtttcagtcgacatgccagggttgagaaacaccaccgacgtcgcatgggccatcgccccgtacgccgatcccagcaaccacgcacacgtaatcagaaccttcaacatagttgttcaagccttgaacgttgagcgccatgataatggcaatgcgacactcaatgaaggctcaatcaacgctcttttactggtggctgacccagaagactgcggttcccaccaccaggatgatcaggaacaaaatcgcccaggcatcaacggtactgtcgggtttacgggcttttgtagaattgctcatcgcatcgcctcttgtcggttttataggtgattgcactaagactcgacgacagtaaagaccacacttgcccccatgacaaatgtgggcattgcgagaatcagtctcattagtcattttggttatttacatatactcaaacatcacttttgcgcataaacgcaaactggtatcgtgcgccggctccgttgggagtgcgcggccgtgcgcgcagatttgccgagaacaggacctatatgtacgtatacgacgaatacgatcagcgcatcatcgaggaccgcgtcaagcagttccgtgatcagacccgacgctatctggcaggtgaactgagcgaagaagagttccgccctctgcgcctgcaaaatggcctttatgttcagcgctttgcgccgatgctgcgggtagccgtgccttacggccaactgacgtcgcgccagacgcgcatgatggccaagattgcccgtgacttcgacaaaggctacgcccacatcagtacccgccagaacgtacagttcaactggccggcgctggaggacgtgcccgacatcctggctgaattggccaccgtgcagatgcacgccattcagaccagcggtaactgcctgcgcaacgtgaccaccgaccaatttgccggcgttgctgccgacgagttgatcgacccacgcccctggtgcgaaatcgtccgtcaatggaccaccttccaccctgagttcgcctacctgccccgcaagttcaagatcgccatcaatggctcgacctcggaccgtgcggccatcgaagtgcacgatatcggcctggagccggtgcacaacgcagccggcgagctgggctttcgcgtattggtgggtggcggccttggccgtacgccggtggtcggcgccttcatcaacgaattcctgccgtggcaggacctgttgagctacctcgacgccatcctgcgggtctacaaccgctacggccgtcgtgacaacaagtacaaggcccggatcaagatcctggtcaaggcgctgacccctgaggtgtttgcccagaaagtcgacgctgaaatggaacacctgcgcggcggccagaccaccctgaccgacgccgaagtccaccgcgttgccaagcattttgtcgatccggactacaaggccctgagagatcagaccgccgaattgaccgagctcgaccagcagcacccgggtttcgcccgctggcgcagccgcaacaccctggcgcacaagaagccgggctatgtggccgtgaccctgtcgctcaaacccaccggtgttgcaccgggcgatatcaccgacaagcaactggacgccgtcgccgacctggctgaccgctacagctatggccaactgcgcacctcccacgagcagaacatcattctcgcggacgtggagcagagccaactgttcaccctgtggggcgagctgcgcgaaggcggtttcgccacgccgaacatcggcctgttgaccgacatcatctgctgcccgggcggcgacttctgctccctggccaacgccaagtcgatcccgatcgccgagtcgatccagcgccgtttcgacgacctggactacctgttcgacatcggtgagctggacctgaacatttccggctgcatgaacgcctgtggtcaccaccacgtcggccacatcggcattctgggcgtggacaagaaaggcgaagaattctaccaagtgtccctgggcggcagcgccagccgcgatgcgagcctgggcaagatcctcggcccgtccttcgcccaggaagccatgcctgaagtgatcggcaaactgatcgacgtgtacgtcgagcagcgcaccgaagatgagcgtttcatcgacacctaccagcgcatcggcatcgacctgttcaaggagcgcgtctatgcagcgaatcattaagaacaacgaagtcctcgacgaaacctggcacctgctgccaaaagacgcgagcttcgatggcatctccaattgcgatgatctgatcgtaccgctggcgctgtggcgcgaacacgcccacgccctcaaggcccgcgacggcggcctgggtgtgtggctggacgccgaagaagaagccgaagaaatcggtgacgacgtggaacacttccaggtcatcgccctgaacttcccggccttcaccgacgggcgcaactattccaatgcccgcctgctgcgtgaccgttacggttacaagggtgagctgcgcgcgattggcgatgtgctgcgcgaccagctgttctacctgcgccgctgcgggttcgatgccttcgccttgcgcgccgacaaagacccgtacgaagccctggaaagcctcaaggacttctcggtgacgtaccaggctgcaacggatgagccgttgccgctgttccgtcgtcgctaagcaagagcgcaaaaaagccccggcatgccggggcttttttatggccgcggtttaatcgacgccaacacctgctgctgccccatggaacacggcacgccttcaggctgggcgcgcaccgcctcgatcacgccgagcaactgcgccttgctgtgggccagttgcgcctgcatcacttcgatctgcgtcaccttgcgttccagcccttcaatcaactcctcgcgcttgtgctcgcccggggccggcatcagcgccttgagttcctgcaaggtgaacccggcctgttgcgcgctctgaatcaattgcagggtttgcagcgcctcttctgaataacgccggtagccattggcctggcgccccacttggctgatcaagccttcggcctcataaaaacggatgcgcgacgccgccagcccgctctgttttgccaactcaccaatattcatcgccaaagcctgcttgacattaaagttaactttaagcttagcctgaggcctcccccgctcaggagtcaacccatgtcaccttttgaagccttgcaactgcccaatggccaaatcctcgccaaccgtatcgccaaggcggcgatggaagagaacatggccgacctgcaccaagccccctcacgcgaactaaagcagttgtacaagacttgggccgaaggtgaaccgggcctgctgattaccggcaacgtgatgatcgaccgccgcgccatgaccggccccggcggcgtggccctggaggacgagcagcacctggccagcttccgtgaatgggccgacgtcgcgcgggccaaaggcgtgcacttctgggtgcagctcagccatccggggcgccagaccccaggcaatctgcgccagccttccgtggcgccttcggccgttgcgctggacctgggcggtttctcaaagatgttcgcgatgcccaaggccatgaccgaggacgacattcaggacgtgatcaaacgcttcgccaccagcgcgcgcttggccgagaaagccgggtttaccggggtgcaaatccacgccgcccacggttacttgctcagccagttcctgtcgcccctgagtaacaaacgcaccgaccgctggggcggctcgctggagaaccgtgcacgcctgctgctggaggtgatcgccgctattcgtgccagcgtcagcccgtcgttttgcgtggcggtgaaactcaactcggccgatttccagcgcggcggtttcgacgctgccgatgcccgcgccgtggtgcaactgctcaacccgttgcccatcgacctgctggagctgtccggcggcagctacgaagcaccggccatgcaaggcgaagcgcgtgatggccgcaccctggcgcgcgaagcgtactttctggagttcgccagggaactggccgccatcgccaccctgccgttgatggtcaccgggggcattcgccgcttgccggtcgtgcagcaggtgctggacagcggcatcgccatggccggcatcgccaccgccctgaccctggaaccgcaactgatcaggcactggcgcgaaggccgcgacctcaacccgcaactcaagccgatcagttggcagcgcaagcctttggccgccctcgccaccctggccgtggtgcgctaccagatgcgccgcctgagccgtggccatgcgcccaaggccgacgtcaaaccgtgcatggcgctggtgcgtgaccaatggtttctggcgcgacgcacccgccaataccgcgccgccatgactcaactttcacattaaagggtgagcattcgccgtgatcgaactgtcctctactgatcagcagctttcaacctcactgacgattggagttcttcatggcgaaaatcaacctggcccagcagttggcgaccacccttgaacaggcgggcatcaagcgcatttggggcctgaccggcgacagcctcaacggcctcaccgacgccctgcgcaccatggacagcatcgagtggatgcacgtgcgtcacgaggaagtggccgccttcgccgccggtgccgaagctgccgccaccggtgagctgaccgtgtgcgcaggcagttgcgggccgggcaacctgcacttgatcaacggcctgttcgactgccatcgcaaccacgtgccggtgctggcgattgcagctcaaatcccctcctcggagatcggcctgaattactttcaggaaacccatccccaggaactgttcaaggagtgcagccactttatcgagctggtgaccaaccccgcgcaaatgccccacgtgctgcaccgcgccatgcgctcggcaatcctcaaccgtggcgtggccgtggtggtaatccccggggacgtgtcactgctggaagtcgaagacacgctcaagccctggcctgccttgcacgccccgcgcacgctgcccgccgagcaggacctgcaacagctcaccgagattctgcaaagcagcgagaaagtcaccctgctctgcggcagcggctgtgccggtgcccacgaccaggtggttgcactcgccgacgcgttgggcgcgccggtggtgcacgccctgcgcggcaaagagcatgtggaatgggacaacccgtttgacgtgggcatgaccggcctgatcggcttcagctcgggctaccacgccatgctcgactgcgacacgctgatcatgctcggcacagacttcccctatcgccagttctaccccaccgacgcaaaaatcattcaggtggaccgcaacccgcaggcgctgggccggcgtgccacactggatctggggattgccgctgacgtcagcgagaccctcgcggcgctgctgccccgcctgacgcgcaagaccgatcgcagcttcctcgaaacctcgttgaagcactacgagaaggcccgccaagggctggatgacctgtcgcagccgtccaaggccgaccgcccgattcatccgcaatacgtggcgcgtttgctcagcgaattggccgacgacgacgccatttttaccgctgatgtcggctcgccgacggtgtgggccgcgcgctatttgaaaatgaacggcaagcgccgcctgatcggctcgttcaaccacggctcgatggccaacgccatgccccaggccatcggcgcgcaggcggccttccccgggcggcaggtgatttcgatgtccggcgacggcgggttcgccatgttgatgggggatttcatttccctggcgcagttgaaattgccggtaaaagtcatcgtgttcgataactcgtcactgggttttgtcgcgatggaaatgaaagccgcgggttatctggacaccggtaccgagttgaaaaacccggatttcgcggccatgtccaatgccatgggcatcctgggtattcgtgtggagcaatccgaagacctggaaccggcattgcgccgcgccttggcccatgacggcccggtgctggtggatgtggtcacggcgacccaggaattggtcatgccgccgaccatcaagctggaacaggccaagggcttcagcctgtacatgctcaaagcggtgatgagcgggcgcggtgatgaagtgatcgagctcgcgcgcaccaactggctgcgctgaccctcaataacgccgggctgcgccgtagcggaccaccacttgggtgatgacttcgactattcgagggtccgcatccggtgcgctgaacagccgaaactcggcgtcgggcaatgcgggtaaaccgtgctcggcgccgagtaccgtcaggcccggccccacctggctacgcgccatgggggcgatggcaaaaccggcagatgcggcagcctgcagcgcggcataactgctgcattgcatggcggtacgttgagcaataccggcctgggccaaccgcgacagcgccgcttcccggtaagggcaaggttcgggaaacaacgccaggggcaagggggatggcagtgtcaccaccggctgcgccgaccaggcccacaccaatggctcgcgccaaagcgccaggcctggctcgctggactcacacaacgaacccaccaccacatccagctcaccttgcttcatgcgcgtcagcaaggtgccgggaatgccgacttgcacgctgatgtgcaggccggggtactcggcggcggcttcctgtaactcgcgcaacaaccgtgcatcggcgaactcttccgacacacctacccgcaggtttccttcaaacgccgagcgcgtcagttcagcccaggcattgcggttcagcgccagaatgccccgcgcgtaagccatcaggcgctcaccgtccggcgtcagttgccgggagcgcgtggtgcgcgtcagcagcggcttgccgacctgttcttcaaggcgtcgcaaatggccactgaccgccgattgcgtcaggtgcagccgttcgcctgcgcggctgaagccgccctcatccacgacggcgacgaaggtcttgagtaacagggggtcaaacatattccgaaacctgatcaatgatgcgttaaaacacgatttatatttcacaactcgctatgttgcaatgcccgggtcaactttccccgaggctcgccatgaccaccctactgcacatcgaatgttcgccacgtaagcaacgctccgcatcattggagatcgctcgtcactttatccgccgctatcagcaaaacgcgccgggcacggaggtggtgacgttggacctgtggtcactcgacttacccgagttcgatgggccggtgatggacgccaagtacgccggcttgagcggcacggcactgacagaagaacaggcgtttgcgtggaaggcattgaaagccctggccgcccacctgcatcaggctgatgtgctggtgttctcggtgccactgtggaatttcgcggtgccctacaagctcaagcactttatcgacgtggtgtcgcagaaagacgtgctgttcgagttcagcccggaacacggcttgcgcggcctgctgcacgataaaacggcgattaatgtgtatgcccgcggcatggacttttcgacgccggatgcccaggcaatggatttccaaaaaccttacatggacgcgtggctcgggttcatcggggtaaccgacgtgcattcgttgtacgtcgagaagaccatcctggggccccaagtcgatcaggcctcacgccagtactccaccgaacaggcttatgcactggctgatcgcctcgcctgagcgcccgctgaaaaagacccggccttgcgccgggtctcaatgatcagccgtgctgcttcgccacccacttgccgtaggcatcgataaacgcctgcaagaagggcttggtcttttccgacaacgcacctgcctcgtcaaacacagctcccgcgccgcccagataggcttccggttgctgcatgcacggtacgtcgaggaacaccagggactggcgcaaatggtggttcgcaccaaaaccgccgatggcccccggtgacacgctgatgatcgcccccggcttgccgctccacgcgctttgcccatacgggcgggagcccacgtcgatggcattcttcaacggggcaggcacggaacggttgtattccggcgtcacaaacaacaccgcgtcggatgagctcacgtgtttgcggaaagtgctgtaggcttccggcggcgcaccttggtcgatatcctcgttgtagagcggcaaatcgccaatttcaacaatattcaacttgaggttggcaggggccagttcagccaatgccaaagcaactttgcggttgatcgacgcttttctcaagctgcccaccaggacggcaatcgtgtagaccttgctcattgaggttttcccgacgtctgactaaaggagcttgtagttatagagtcttcaaggcgtgttcaccagcaagttgtgcaggtcccgtcatggctttccgcgctgccgtttgcgtaggaagcgtctgaatgcttcaacgaatagtattttttttccataggtaaactaccccgctcgatgacggtctacagaaccgcaaatcgagtgtttatctccagaggttctaaacagatggctgcagtacttgtcggacagttccatgccagagacgcggaaggacgcgtgtattcggtgcatgagttccaggaatccaacccggcgcaggacagccaggctggctcgacgcctaccactacctacaagctggccattggcgaccgtgtagaaaagttggaaggtgatgagttcaaactgattcagtcgggcacgatcattgtgcgcgaatcgcaaacgaccctcgcttcataagatcccgcctgacccggaacctacctgctcagtcttgcccatttttcggcactggctgggctgggcggcccgcatcctgcttaacgaagttgcacacttgtaatctcggcgtgcgggcttttattcattttcctgacctcgacccatgcccgcccacggtctccctcaacgctatacagatagagttcgtaacccggggtatcgccagccgggccaccgaagccgggatagctgtgcacacgcttgatcacgctgacggaagaaatgacgcccacctgctcttccacgctcaactgagagcgaataaacgcctgaaactcgacattgtacggatcgttgatttcgtagtacttggcgaccacaccggccatgcacactgcgatgactgcgaccagccaccacttccagcgttttcgttcaaaagcactcacgggcacctccctggcaccacctgtcaaggttgacgaatctgcgtcacttcaacggcctgctcgccatccagttgtttaagcgtcaccaccaatcgccccttctcgccttcgacgtcatacatcaaacgcttatagcccggcgccccatacgcgggatacgccaccacctggcgcaccagcgtaatacccagcaccgtgcccacttgctcgccgacctgctcctgggaacggataaacgcctcaagcgcgaggttttccggggtgtgttcatcgctggcattgaagagataagcagccgcgcaccccacggtcaacaagaccagaagttgcttggccgttaccccgaagaagatcgcgggtagaggcatgtgagaccagacctgtttttgttgtaattgccgggtaaacggcatgggtcgttgatgatcagaaccgccattctaatcaggtcggtgggcaataccagaggtatcagtggtcgccgtaggtaatatccttgttttccccgacacccccgagggtgcggtctttgccgaacgagaacagatcaaagggggtttgcgcctggctggacggatagtggtactgataggacacaccccaggggtcggtcagcagttcgtctttgacgtaggggcctttccaacgggtttcaccttccggctgtgaggtcagcgcatcgaggccttcgtcatcccttgggtaacggccggtgtcttgatggaactgctcgacagccttgcccaattcaacgacctggcttttggccgtggcgatttccgcgagcgtcacatcaccaaacaaccgcggcccgacggccagcgccagcaagccgatgatgaccaacgctaccagcacggcccatcgggtaaaaccgcgctgagcgtgcaagctgtcattggctgctgttttgccgggcattgtagggttccctctgagttctttggttgatacacgcattgtgtgaaccgccggttgcagtaccgcacagacttaacggtagacgccccgggcgcaggctcgcgctcttttttgcccagccattgaaaccccgccgcgtgcaccctagactccggccatgcgtttacgtcatatcgaagtgattcaggccatcttgcagaccggacatccaggcttggcggccgaatggttgcaacttcccgtgggcgatgttgaggcagcgctcaaggaggccgaacagcaattgggcttcatgctatttgccagcgtgcgcgggcgtttgcaagcgacgcgcgaaacattggagctgcaagctgaaattgcgcgcgtgtatgaagcgctggagcccgtgcaacggctggccagccgtttgaaacatcaccatgccccgcccttgcgcgccttgtgcaccccgccactggccaatcaactgctaccgcaaagcatcgctgtgctgcgccgccgctttcaggacaccccgtgcaacctgtccagccaaccgacccgggacattgtgcgcagcctgttgctgcatgaggccgaagtgggcctgagcctgcacgacccggaacatccgcaaatccagagcaccgtgctggcccagggcaagctgcaattgctcgcgccccatggctggctcaagcccaaacagaaatacatcgcgctgcaggacctggccgggcagtcgatgatcggcctggaaggccacgaccctttaagccgcctgctcgacgccaagctgcaagccctgcggccgctgcccgtggtgcaaacgcgggtgcagacctaccagatgatgcgcagcatggtcgaagccggtgaaggcttggcgattgtcgatcccttcaccgccttcggcgcgcgggaggcagggctggatgcgtgcccggtgtcgccgccgatcctggtgagcctttttgcattgaccctcaaggaaggcgtgaccacgccggcactgaatgcactgctggacattatcacgcagaaggctgaaagcctgttggcgggttaaatctgttcaacttcactcttgaacaggcggtaccagaaaatcgccacctcgcgagtgtgcgggtcaatgccgcgatagcgcagttgatcaatcccgcccatcacatacccgcaacgctcatacaggcggcaggcgccgaggttgttgttctgggtctcgagcatcatgcccggcaggtttttcttgcggctccagaactgcgccacatccagtaacgccttggccaccccatgacgccgcgcgggcaacgccacggccagctcatcgacatgggcaaaaccgttccaattggtgctgaccacaatgtgccctaccgcacggtcatccaggtaggccatgaagatcgcgctgtccggcgcatcacgaaaactggcgaactcttgcgggtcgatgccatagcatttgcggtacggcatgatgcgctccaccacccactgatcgacgcgcttacccatctgcggcacgccataggcgccgacctcaaaactgaaatcgttgccccacacgtaggcgtcaaagccctcgtcggccacacgcacactgagccccgggtacttcgggttcattacagcttgcataaacattcttaacccttgatgcaatcgacggtgtaacaacgaccactgccgtcgtcttcgtgttgcaacccatgaacatcggcgacaaaaccgggaaagctgctatcgaacgtccgggcaaacgccaggtagtcgatgatcgaacgcgttgactcggtaaaacgctcgccgggcatgatcaacggaatgcccggcggataaggcaccagcatcacggctgcgatgcgccctggcaaggcgtcgatggaaaccgcctcgacttcacctctgaccaattggtcgtaggcgtcggccggcttcatcgcgatttccggcaaaacggtgtacatgcgtttgaggtgcttggccgtggcgttgctgcggtagcaactgtgcagctgatcacacaggtcgcgcaagcccaggccttgatagcgcaccgggccctgagcgtagaccgatggcaaacagcttgcgaggctggcattggcgtcgtaactgcgtttgaactccagcaattcggtgagcaaggtactccatttacctttggtgatgcccatggaaaacagcacgaggaaagaataaagcccggttttttccaccaccaaaccgcgctcccaaaggaacttgctcaccaccgccgccggaatgccgcgctcgctcaaggcaccaccggcgttcaggccgggcatcaccagcgtgactttgatcgggtcgagcaacacgtaatcttcggccacatcaccaaagccgtgccagtcatcctgcgggtgcagcagccagtccgccgtggcgacgcggtcaatgccggccacggaaggtggctgccagatggagaaccaccagtcttcagccgcgatgtgctggcgcagattggccagggcgcggcggaaactcagggcctcgtcgaacatctcttgcaatagcgagcgccccgccgggccttccatcattgccgaggccacgtccagcgaggcgatgatgctgtattgcggcgaggtggagatatgcatcatgaacgcttcgttgaatcgatcacggtccaactggcgtgcgccgccgtcctgcacatggatcatcgaggcctggctgaaggcggccagcagtttgtgagtcgagtgcgtggtgaacaccaacgggctgtccggggtgcgcgaagtgcccatgccgtaacgaccggcgaagaactcgtggaaggcggcgtaggcataccaggcttcgtcgaagtgcagcacctcgacactgttgcccaactgctgcttgatcagctcagcgttgtagcacaggccgtcataggtggaattggtgaccacggccatcttcactttcggtgggcggccacgggtcagcgggcttgcgtcaatcttggcgcggatggcatcggggctgaattcgcttaagggaatcgggccgatgatgcccaactcgttgcgctccgggcacaggtacaacggaattgcgccggtcatgatgatcgaatgcaacaccgatttgtggcaattgcggtccaccagcaccagatcgtcacggccgaccatggagtgccacacgatcttgtttgcggtggacgtgccattgattacaaagaacgtgtggtcggcaccaaagttgcgtgccgcgcgggcttcggcctccgccagggggccggtgtggtcaagcagcgagcccagctccggcaccgaaacagacaaatccgaacgcagggtgttttccccaaagaactgatgaaacgcctgccccaccgggcttttgcggtaggcaaccccaccgccatggccgggggtgtgccaggaatagttggagtcggccgtgtgctgcaccagcgctttgaaaaagggcggcagcaggccatcaaggtaagtgcgcgcagcccgcgcgacttgccgggccagaaacggcacggtgtcttcgaacaggtagagaatgccgcgcagttggttgagttcactcatggcatcggccggggcgttttccagggtgacctgctcgcccaaggcaaagatcggcaaatggggcgccctcacccgcgccaggcgaatcagctcgaccatgttttgcagcaggtgggtgttttcgccggcgccttcagcggcgatcagcatgcaggcgaggccgtgatgagtggaggccaccagccggccttcggcgtagtccacggcggaaaagatgctgaagccctcctgttccaactctctggcgatgcctcggacccggtcaccggcaacggtgtcggccttgatgtcgcggtgcacgatcaggatggggaacttcaggtctttgtacatgagtgcgttcagtcctgagggctatgcactcaagggtagaagctgcgacgggatgacgcgaatgaagattttgaaagcaatgccaatcaactgtgggagctggcttgcctgctcccacatcaatcagtgctgggtcagcgtggaccacaacgccggcgcccccgccgacttggcaatcgcttccaaccgcgccgcatgctcggccatgtcctgctcactggcgcgaatgatcacgctcggcttgcgatcggccggcaagcggcggatttccgaaggacggttgcccgaaccttccgccgaaccactgccatcggaggcgttgccggccagggacaggctggtctgcccgccggtcatggtcaggtagacgtcggccagaatctcggagtcgagcaatgcgccgtgaagctcacgaccggagttgtcgacaccatagcgtttgcacaaggcatccaggctgttgcgctgcccggggtgacgctcacgggccatcatcagggtgtcgaggatcgaacagtgttgcgaaatatctgcacggtccgtctgccccatcagggcgaactcgttattgatgaagccaacgtcgaacgccgcgttatggatgatcagttgtgcgccattgatgaactcaaagaactcatcggcaacttcggcaaagcgcggtttgcccttgaggaattcgtcggtgataccgtggacgccgatcgcgccctcgtcactgtcgcggtccggttgcaggtagacgtggaaatgacgcccggtcaggcggcgccccatcagttcgacacagccgatttcgatgatccggtggccatcggtcaccggcatgccggtggtttcggtatcgagtacaacagatcggatggccatcagggttcagctctcaacgggtggtgtatttcaaggagcggaatattagcacgtcatgctcccggcagcccaaggctcgcccaagggcttgacgcctctacagtttcttacactctttagcaaagctgcagcagtttggccaaggcgcgcttgttagcctgcgagcccaacccgatgcggactttgcagaaccatgaacctgtcaaaaacactgtgcgcgctattgctgagcagcagcgcttgcacggcacacgccaccagcttcgtgatgaccactgactttctggtcagcctgtccatgagtgcaaccaaaggcaccagttcctcattcaaggatgacaagatcgttcaggccgcccgggatgacgccgaagcctatgtcgccagtgacggccggatccatggcgtgcgcctggagtcggcgctggtgcatatccgtgaacgcctgcctggccaaaccttcaccgacatgcaactggcccaggccatcgctgcactttaacgctcaactctgcttgtagccccgcacatcgtccacgccccggttggcgagctggtcggcgcgttcgttgccaggatggccgatgtgcccgcgcacccatttccaggtgatgttatggcgattgcattgctcgtcgagcaattgccacaggtcagcgttcttgaccggttctttcgcagcggttttccagccgcgcttcttccagttgaccatccattcgttgatgcccttcatcacgtactgcgagtcagtcaccagcagcacgtcacagcggcgcttgagttcttccaggccgcgaatggcgcccatcagctccatgcggttgttggtggtgttgggttcgccgccccacaactccttctcgacgcccttgcacaccagcaaggcgccccagccgccagggcccgggttgcccttgcaggcgccatcggtaaagagttctacggtatcggtcatcggttgcatccatcaaaaacaggcagggtctgaaatcagaaaagaggtttacacatcgctttgcttgcggttgaccttggccatcggcatcggcaccagcttgcccatgggctggcgtagcacctggcgcaccgggcgcagcccgaccactatcttgcgcgcgaccaataaatagaagccgccacccgacagttgccaggcgcccgcacggcgttcccagccggccaggcggccttgccacttggtcgaggcaagcggcggacgatagcacccgaagcggcgtttctccagcgcaaagcccagcaggttcagccagtcagccacccgtgaaggcgagatgcaacgggcctggcgcagggcgtcatgggcgaacacatggcgcaggccccaactgctccaggggttgatgccgataatcagcaaatggccaccagggcgcacactgctcgcggcttcacgcagcaacccgtggggcgacaggcaaaaatccaggccatgctgcaacaccaccacatcggcggcgtgttcactcaagggccaggcctgctcttcacagacaatctccacccccggcaacggcgcgcccaaccttacgttgcgttgcacctgaggcgccgacggcggcgtctgcgccgacgggccataatgcaccaggtagccgccaaagaaccggcccagctcgtcttcaagcatttgccgctcttcatccagcaaaaattgcccgatcggcccggacagccaatcgcgggccgcgctgatcagggccagccactcggggtcggcctgggcgaacgctttatcagtcattgcattctccaactcgcctagacgttctaagatgcaccaatgtgttcagcttggcgaatcgaagaatgatacagatcagtgccctgcccgccttcaccgacaactacatctggttgttacaagacccgcacacccgacgctgcaccgtggtcgacccgggcgatgccgcaccggtgctcgcctggctcaagcaacacccggagtgggccttgagtgacatcctgatcacccaccatcacgctgaccatgtcggcggtgtcgagcaactgaaaagtgtaacgggcgccacggtatatggcccggcgaacgagaagatcccggcgcgggacgttgccttgcaggataacgatcgcgtcaccgtgctggggtggggcttcgacgtttatgcggtgcccggccacaccctgggccatatcgcttattaccaccagggtgtgctgttctgtggcgataccttgtttgccgccggctgcggccggctgtttgaaggcacgccggaacagatgcacacctcgctggagcgtctcgcagcgttgccggccggcacgctcgtgtactgcacccatgagtacacgcaaagtaaccttaaatttgcccaggcagtggagccggataacgcagacatcgccgaacgggtggccagcgtcaaccaattgcgggcctctggcgaaatgacgctgccctccaacctggctcttgaaaaacgtactaacccttttctgcgcaccgcagaaacatccgttaaacaaaaagcggacgaacggaacggccgtgacaaccgctctggggccgaggtgtttgctagcttgagggcctggaaagataagttctaagcggatgcaatttgatacggattttctgaatggttgaccggaaccaaagcgctttctagaatcgcccgacatttttgaccggaacttacttccagccaatgtcgtcatctattcgtaaatccatttcttcagacgcattgacccgcctggctcaagctgtggcggtggctgtgtccgcgactctggcgggctgccaatcgacaaatttcgctgcacaatccaccgtgcaacccaaaccgaatcttgctgccaagatcaagcaaaaacctatctggctttcagagaagcccagccccgaagccccccaggatgtctgggagcgcatgcgacggggctttcaattgcaggacggcctgggcgtcaacccacgcatcgagcaacagcgtttgtggttcgccagcaacccgtccttcctggagaacgccggcgaacgcggcagcctctacattcactacatcgtcgaacgccttgaagaacgcaacatgcccctggagctggcgctgctgccagtgattgaaagtgcctacaaccccatggcctattcgcgcagcgatgcagtcggtttgtggcagttcatcccctccaccgggcgctacttcaacctgcgccagacccgcgcctacgatggccgccgcgacatcactgcctccaccaccgccgccctggactatctgacccgtcttcatgacatgttcaatggcgactggctgctggccctggcggcctacaatgccggggaaggcacggtcagccgggccatcgagcgcaacgagaagctcggcctgccgaccgactactggaacctgcccctgcctcaggaaaccaaggattacgtacccaagttcctcgcgctgtcccaggtggtgctggcccccgaggcctacggcgtcaacctgagcccgattgccaacacaccgtatttcgaagtggttgaagtcaagcagagcatggacctgtcacgggttgccgcgctggccgaaatcgacgaagacgaactgttccagctcaacccggccctgaaacaacgcaccaccctcgacggcccgcaacacttgctcgtgccaagctccaaggcacaactgctgaccagcaccctttcgacgatgaagccggaagaattgctggccatgcgcccgaaaaagcaggtgttcgacgaagttgagaccacccgcgtagccgggcgcacccgcaactacaaagtcaggaccggcgacaacctcacgctcatcgccaaggccaacaaggtcgatgtgcatgacctgcaacgctggaacaaactcaacggccaggcactcaaggtcggccagaccctggtgatgcaggacacgcgcaagctggtagccaaggctgacagcaagaagccggtgcaatacaaggtcaagaaaggcgactcgctgtacatcgtcgccaagcgcttcaacgtcgagatgcaacatctcaagcgctggaacccgcgcactggccaggcgctgaagccggggcagatgctggtggtttccgggccgcgctaacgtctgtgggagctggcttgcctgcgatggcctcacctcggtgccccggatgtaccgaggcgaggccatcgcaggcaagccagctcccacatttgtttcgcacatggcgcaacactgagccagcctcaagctggcgttttcaacaacctttttccaaccggaacaagctgttactgtaccgatcataaagcccaagccgcctggatcggatctctgacttgaagcgtcccctccttctactaataagtctggccttgagctttgctgcgaacgcgacgattaccgagagccacggttatacgcagttcggcaggctcaagtacccggccaaattcacccagttcgattgggtaaaccctgcagcgccgaaaggcgggaccttgcgggtcatggcatttggcactttcgacacccttaacccttacaccttcaagggttcaagcccggtttccacgcccaacttcctgcaatacggcgtcaatgagctgaacgagccgctgatggtcggcaccggccagtacgcgccctccggcgacgaacctgcgtccagctatgggttgatcgcccaatccgttgaatacagcgaagaccgcagttgggtagtgttcaacctgcgccccgaagcccgctttcacgacggcaagccgatcaccgcctatgacgtggcgttttcctaccgcaccctgctgactgaaggccacccgcagtaccgcaccaacctgcaagaggtagcgcgggtcgacatcctcaaccgtcaccgcattcgcttcgtgttcaagcgcgccggcaacccgttgctgatcctgcgcctgggcgagttgccggtattgccccagcattactggaaaaaccgcgacttcaaggccaccacgttcgagccgcccttgggcagcgggccataccgcatcaccaaagtcacacccggccgccaactggtgttcgagcgggtcaaggattactggggcaaagacctgccagtcaacaaaggtttctacaactacgacaaggtcgacgtggagttctaccgcgacagcgacgtagccttcgaagccttcaaggccggcgaattcgacatctatatcgagcaccaggcgaagaactgggcgaccggctacaacttcccggccgtcaaccggggcgacgtgatcaaggcacagatcgcccatcagatcccgacccaaagccagggcctgttcatgaacacacggcggccgacgttcaaccagaccaaagtgcgcgaagccctggggctgatgttcgacttcgaatggaccaaccgcaccctgttcagcagcgcctataagcgcaccctcagctattaccccaacagtgagttctcggcgaccggcgtgccggtgggccatgaatggctgatgctctcgccctaccgcgaccaactgcccgccaacctgtttacccaacccttcagcctgccgcagaccgacggccgcggcattccccgcgagaccatgcgccgcgcgctcgccctgctcggtgaggccgggtggaagctatccgggcaacgtttgctcaacagcgaaggccagcctttgcgcttcgagattctgctggtcaacccgaacctggaacgcatcctgcagccgtatgtcgagaacctcatcagcatcggcatcgacgcgcgcctgcgcaccgttgaccgcgcgcaatacaagcaacgcctggatcagttcgactacgacatgatcctgatcaccctcaaccagaccttgagccccggccttgaacagtggcagtacttccactcaagccaggcggcgatcaagggcagcaagaactacgcgggcatcgccaacccggtggtcgatcacctgctggagcagttgctggcggcgaagacccgcgaagaacaactggccgccggccgtgccctggaccgcgtactgctgtggcagcactacagtattcccaactggtacctcaactatcatcgcttggcgtaccgcaaccggttcgcctttgtcaccacgccgccctacagcctgggcctgagcgcgtggtggctgaaagcttcggagaaagcccaatgatgtctttgcgtactgccttgctgggcagcctgttgctgtgcggcgcggcgaatgccgcgccgcaacatgcgctgacgctctacaacgagccacccaagtaccccgccgacttcaagcatttcgactacgtgaacccggacgcgcccaagggcggtacctttcgcgagtcgagcatgggcggctttgacagcctcaacccctacatcagcaagggcgtaccggcggataatctgccgctgatctacgacaccctggccatgcaaagcctggacgagcccatcaccgaatacggcctggtcgccggcaagatcgaaaaggccccggacaacagctgggtgcgcttctatctgcgcccggaggcacgctttcatgatggccaccccatgcgcgccgaggacgtggtgttcaccttccaggcactgatcaaggatggctccccgctgtatcgcacctactacgccgacgtcgacgaagtgatcgccgaagacccgctgcgtgtgctgttcaagttcaagcgcaccaataaccgcgaattaccactgatcctcgggcaactgccggtattgcccaaacattggtgggcaacccgtgacttcaccaaaggcaatctggagattccattgggcagcggcccgtacaaggttgccgaagtcaaaccggggcgcatggtacgttacgagcgagtcaaggactactgggccaaggacctgccgatcacacagggcttctacaacttcgataaccgcatcactgattattaccgcgacagtacggtagcccttgaagccctgaaagccgggcagttcgattattggctggagttcagcgccaagaactgggccaacgcctacaatattccggccgtcacccaaggccggctgatcaaggaagaaatccccaacggcaaccccaccggcatgcagggttttgtgttcaacacgcgcaagccaatgttccaggatgtgcgggtgcgcaaggccatcagcctgctgctggatttcgagtggagcaacaaacagctgttcaacggtgcctacacgcgcagccgcagttattttgagaactcggaaatggccgccaccggattgcccggcccggaggagctggcgatccttgaaccgctgcgcgacaaaatcccggccgaagtcttcactcaggcctttgaaccggccaaaaccgacggcagcggcatgatccgcactcagcaacgcgaggcttaccaactgctgcaagaagcgggctggaagatcgtcgacgacaaaatggtcgacaccaccggcaaaccggtgaccatcgagtttctgctggcccaaaccgagtttgaacgggtgctgctgcccttcaagcgtaacttggccgaccttggcatcgacctggtgattcgccgggtcgacgtgtcccaatatatcacccgcgtgcgttcgcgggatttcgacatggtcgtgggcagcttcccgcaatccacctcgccgggtaacgaacagcgcgaattctggaagacctccagcgccgacaaaccgggcagccgcaattacatcggcctcaaggacccggccatcgaccaactggtggaagagctgatcgacgccgactcacgcaaaagcctggtggcccacgccaaggcgctggaccgcgtattgcagttcggctattacgtgatccccaactggcacatcaagacgttccgcgtcgcgtactgggaccacctcggccaccccaaggtcccgccgcgctatgacgtcggcaccgccacctggtggagcaagcccgatgccaaaccggcggttacccccgacacaagcacaagcgccgatccggcgagcggaggcgattaaatgctggcctatatctttcgccgcctgctgctgattatccccacgctgttcgggattctgctgatcaacttcatcatcatccaggccgctcccggtggcccggtggaacagatgatcgccaagctcgaaggctttgacggcgccaccagccgcatcgccggcggcggcgccgaagtctcggtcgccggctccagttaccggggcgcacagggcctggacccggcgctggtcaaggaaatcgagaaaatgtacggtttcgacaagtcggcaccggaacgcctgtggatcatgatcaagaactatgcccggctggattttggcgacagcttcttccgcgatgccaaggtcatcgacctgatcaaggagaagatgccggtgtccatctccctcgggttgtggagcacgctgatcatgtacctggtgtcgatccccctgggcatcgccaaggccacgcgacacggcagccacttcgacgtgtggaccagttcggcgatcatcgtcggctatgcgatcccggcgttcctgtttgcgatcctgctgatcgtggtgtttgccggtggcagctatctggactggttccccttgcgcgggctgacgtccaacaactttgaggaactgagctggggcggcaagatcctcgattacttctggcacctggcgttgcccgtgaccgcgctggtgatcggcaacttcgccaccatgacgctgctgaccaaaaacagctttctcgacgagatcaacaaacagtacgtggtcaccgccaaggccaagggtctgactaaccaccgcgtgctttacggccatgtgttccgcaacgcaatgctgctggtgatcgccggcttcccttcggcctttatcgggattttcttcaccggttccctgctggtggaagtgatcttctccctcgacggcctgggcctgatgagctttgaagcggcaatcaaccgcgactacccggtagtgttcggcaccctcttcatcttcaccctgctggggctggtggtgaagttgatcggcgacctcacctacaccctggtcgatccgcgtatcgacttcgccagccgggagcattgagatgaacctgtcccccctcaatcgccgccggttcgagcgcttcaaggccaacaaacgtggctggtggtcactgtggctgttcctgattctgttcgtgctgagcctcggcgccgagctgattgccaatgacaaaccactggccgtgcacttcgacggcggctggtatttcccggcactcaagcgttacccggaaaccactttcggcggcgaattcccgctggaggccaactacaagagcccgtacatccaggaactgctcaaggccaaggacgcgtggaccctgtgggcgccgatcccgttcagctaccagagcatcaactacgacctgaaagtccccgcaccggcaccgccgtcgagcgtcaacctgctgggcaccgatgaccagggccgcgatgtgctggcgcgggttatctatggcttccgggtctcggtgctgttcgccctgacactgaccgtgctcagctcgatcatcggcgtgatcgccggggccttgcagggtttctatggcggctgggtggatctggccgggcagcgcttcctggagatctggtccggcttgccggtgctctacctgctgatcatcctggccagctttgtgcagcccaacttctggtggctgctgggaatcatgctgctgttttcctggatgagcctggtggacgtggtgcgcgccgagttcctgcgcgggcgcaacctggaatacgtgcgcgcggcacgggcgctgggcatgcagaacggcgcgatcatgttccgccacatcctgcccaacgcgatggtctcgaccatgaccttcatgccgttcattctgaccggcgccatcggcaccctgacggcgctcgacttcctcggctttggcttgcccgccggctcgccgtcgctgggtgaactggtggcccagggtaaatccaacctgcaggcgccatggctgggcatgagtgcgtttgccgtgctggcgatcatgttgagtttgctggtgtttatcggcgagtccgctcgcgatgccttcgacccgaggaaatgagatgaatcaggacaatctgatcgaagtccgcgacctcagtgtcgagtttgtcacgggtgagcatcaccaccgcgtggtgaacaacgtcagcttcgacatcaagcgcggcgagaccctggccctggtcggcgaaagcggctcgggcaagtcggtgaccgcgcattcgatcctgcgtctgctgccctacccgttggcgcggcatccctgcggcaccatcagctatgccgggcaggacttgctgacgctgaaagaaaaaaccatccggcatattcgcggcaaccgcattgcgatgatctttcaggagccgatgacctcgttgaatccgctgcactccatcgagaagcagatcaacgaagtgctgggcctgcacaaagggctgcaaggcaaggtagccacccaacgcacactggaattgctggagctggtaggcatccccgaaccccacaaacgcctcaaggccctgccccacgaactgtccggcggccagcgccagcgggtgatgatcgccatggccctggccaacgagccggagttgctgatcgccgatgagccgaccaccgccctcgacgtgacggtgcaattgaaaatcctcgaactgctcaaggagctgcaggcacgcctgggcatggcgctgctgctgatcagccacgacctgaatctggtgcggcggatcgcccaccgcgtatgcgtgatgcagaaaggctgcatcgtcgagcaggcggattgcgagacgttgttccaggcgccacaacatccttatacccaggaactgttggcggccgagcccagtggcgggccggccaccaatgaagtcggcccgccgttgctggaagtcgataacctgaaggtctggttcccgatcaagaaaggctttttgcgcaacaccgtggattacgtcaaggcggtggacggcatcaatttcagcctgccccaagggcaaaccctgggtatcgtcggcgaaagcggctcgggcaaatccaccctgggcctggcgatcttgcgcttgatcggcagcaagggcggtatccgcttcgaaggccagcagctggacgcactcagccagcaacaggtgcgcccgttgcgtcgggaaatgcaggtggtgtttcaggaccccttcggcagcctgagcccgcgcatgtgcgtcagcgagatcgtcggtgaaggtttgcgcatccacaagatgggcacgccggccgagcaggaagcggcgataatcgcggcactcaaggaagtcggcctggacccggactcgcgtcaccgctacccccacgaattttccggcggccagcgtcagcggatcgccatcgcccgtgcgctggtgctcaagccgcgcctgattttgctcgacgaaccgacctcggcactcgaccgcacggtgcagcgtcaggtagtggagttgctgcgcagtttgcaggccaagtacaacctgacctacctgtttatcagccatgatctggcagtggtgaaggcgttgagtcaccagttgatggtggtcaagcatgggcaggtagtggaacagggggatgcgcgggctatttttgcggatccgcagcatgcctatacgcggcagctgttggaggcggcgtttctggtgccggcgaatcaggttgtttgaggtgaacctgtgggagcgggcttgtcgaatcgtcgcaccgctgcgatacaggcacctcggtacatcaggcatacccagttgatgccatcgcaggcaagccagctcccacagagaagcagacttgtgaagagattagaggctcacccgctcccacatttggattttcatttgtctgaagaaatgcaatctgccttggcaaaaacagcgcctctgattcaaccactcaggtcggctactaggccgccgtgctttagattttgatcttgatctgaggcgccccgttaaccacgctggccgcacgcaggcttgaagccgtgggtaacccggcaggacgccgggttagccgcgatgggccagggatggcccatggcggcggcccacggattcaagccggagtgcgggcacaccgagcctaggcgaggtgccgagtggtggggcacagaccttttggttacttttggggcgtttgccaaaagtgacccgctgtaagagcggaacccatagtggccgttaccgcagcaatggatatgtacaccaaccaccctacccactcagctcttgtaatccgtatccgttcgctccaactgccgaatcaacgcattccaatgcctggccacccccggcccctcaccattactgaacaccttggcctgctgctccaccttggccaccacctccgccggcggaaagatcaattgcgcattcccccccgcctgcgccgcaatctggatattgcacgcgcgctccaacccttgcagttgctgaaacgcatgctccacgctcacaccagccgtcaacaagccatggttacgcaggatcatcacactcttgtcgcccaagtccgccaccagccgctcacgctcatccaggtccagcgccacgccttcataaccgtgatacgccacgcgcccggaaaacgcgatggagtgctgggaaatcggtaacaagccgtccttctgtgccgacaccgcaataccgtcgcgagtatgggtatgcaacaccgcttgcaggtcatggcgcgccccgtgaatggcgctgtggatcacgtaacctgcgtagttgatccccagcccggtcgggtcatcgacgatagtcccgtcgaggtcgaccttgaccaggttggaggcgctgatttcatcaaacaacaagccaaaggcgttgatcaggaaatgctcgtccggcccgggtacgcgggcggaaaagtgcgtgtagatgtgatcggtccacttgtacaaggccgccagccgataggccgcagccaacttgacgcgcacttcccactcttctggcgtgacgcgctgacggacgttattggagacactcgatatcgaggcgacgctgctcatggcaaaacttcctggatggccttaaggacttccaggcagcctaggggatgtcgaaaaataataaaaagcacattttaatctaagctaattattattttttttcatatcaaaaacagaaagaacacagaacaaatgtgggagctggcttgcctgcgatagcatcgccgcagtgcaactgatacacagaggtgacggcatcgcaggcaagccagcttgtatgctaggacttgaagggaggaggagggacaaagccagattctgactgttggcgcagtacagaccgtgggagatttcgcccctcctcctttcacccaagcgccgataaagaatgcatctggctatgaccgacgataggaacaagcctgcgcctctgggtgagcccttcaagtgctcaaaaccttagcccggaggaagtcactatggcaatgccagttcccgtctccaagccgattgttggtattgatgtcgcaaaaaatgaattggtgatttatcacgccgatctcgattttttggaagcaatcccgaataccaaagccgctataaaaaagtggctgggggctttgccaggcagcgttgctatcgccattgaggccaccaacacctaccacttggagtttgctgatctggcctatgaagctggctgcgttatctacatggtcggtggttatgaactcagtcattaccgcaaaagtgtgaaggttcgtgccaaaactgatgccctggatgcccaattactagcacggtatttgcgaaaagaagccgacgagcttcgcccctggacaccgccgtcccctctttatcgccaactgttgagccttttccgccgccgtgccgccctggttcaagctcgcgtcagcctgacgcaaagctgggcgaatgaaccgctgttgaaggcctcttttgccgagcaaatgaagtcgatgcaaagacttgaaggactgatcgaaaaaatgatcagcgatcgactgaaagaggctgggttactgggccaactcaaacgttgcatgagcgttgaaggtatcggctttttgaccggggcccgcttgattaccagcttccagcgaggtgactttagaaatgcggacgcatttatcgctttcttgggtatggacttgcgcgtctccaagtccgggcagaaagataatcggcgcagtttaagcaagcgcggcgactcagaagcgcggcgtcttctgcataacgcagcaatggcggctagccggactgcagcatggacagagttttaccagacgcagcgggcacggggatatagcaccactcaggtactggtaatgttggctcgcaagcttgctcgggtggtatttgccttgctgaaagggcaaaacgaataccaaccgaaggttggttgagggttgctccccaaccatagaatctcccacagggggaatcaggcggcgtcgcggattttatgcaacgaggccgccacccgctcgccaaacgcatccaccggcgcttgcaggttaccgaggaaatgcgggtagatcagccacaaatccatcaccggtttgaagtccttgagcggcatcactgccagctgctcgcgatgcgcgctgcgctccagcaacggacgcggcaccaggcctagccccagaccatccgcgacaaggcccagttgcaactccgtgccgaaggtttccaggttcacccgcaacgccaggccctggtccgacaacgtacgctgcaaccccgcacggaagccgcagccatccgggttaagaacccagccgttctgatacacatccgccagcttgcacggctttttcggcagctgggatttggcacagaccaccaccaactccatcttgccgatggactcgccgacgatgttgtccgggaaaatcttgcccgccgggaacagcgctgccgccgcatccagctcaccgcgctcgatcttgccgaccagttggctgccccaccctgtcgccacctgggcacgtaaatcggggtattcgctgcgcaagtgcttgagcgcatcgagcagcaccacatcgccgatggtctgcggcacgcccaggcgcaacaggccggtaggcggcgcgtcagtcgccaccagctcacgcagcgcgtccatctcgcgcaggatcagccggcattgttcatacacccgggtaccgatcagcgtaggcttgagaggcttggtgttgcggtcaaacaactccacccccaacgcttgctcgaagttctgcacgcggcgggtaatggccggctgggtcagttgcagcgactcggcggcatggctgatggactggcaacgaatcacttcgacaaaggcatcgatatcgtcaattttcatttgggccgcacatagagaacagtcattaagatgtgcgccaagcatagttgtcgccacgcggtctgaatagcccacgctgtgatcgataacgtctaccgctattcagaccggttctaaattacctccagctataagctaatcattaaaaaatagcatattaactataaacattatgcttagataaacccatcaacacagactgatggaattgccatgacccaggcccgacaccccgaaagattgagagccttcataggcgccctggcggaactgatcgacggcaacccacgtgaaggcgacctgctgcaccgtggcggcaaactcctcgcgcagctggtcagccatgacgactggctccccgacgaatatgcccaacccaaccccgagcgctaccagcaattcctgctgcatgccgactcgcgccagcgcttcagcatcgtcagctttgtgtgggggccgggccagaccacgccgattcatgaccaccgcgtgtggggcttgatcggcatgctgcgcggttctgagttttcccaaggctttgagcgcgcgccagacggcagccttgtcgccgaaggcaagccgattcagttggtgccgggccaggtcgaggcggtgtcgcccaaggtgggggatatccatcaggtcagcaatgcccacaacgaccaggtgtcgatcagcattcatgtgtatggcgccaatatcggcgcggtacgccgtgcggtgtaccagcccgacggcagcgagaaactgtttatctccggttattccaacgcctacctcccgaatatctgggatttgtccaaagaaaagagccctgccctatgaccaccgtatcgactcgccgcttcgcgcagattcgccaggccctgttggatcatcaagaagtcgccctggtggacgtgcgcgaagaagcgccatttgccgaagcccacccgttgttcgccgccaatatcccgctctccaaactggagcttgaggtgtactcgcgcatcccacgtcgcgataccccagtcaccgtctacgacaatggtgaaggcctggcggcgcgtgccgccgagcgcttgcttgaattgggctacaccgacgtcagcctgcttgagggcggcctcgaaggctggcgccgcgccggtggcgagctgtttatcgatgtgaacgtgccgagcaaagcctttggtgaattggtcgagagcgagcgccatacgccgtcgctggccgctgaagaagtgcaagccctgctcgacaatcaggccgatgtggtggtgctcgacgcccgccgcttcgacgaataccagaccatgagcatccccaccggcatcagcgtgcccggcgccgagctggtgctgcgtgcgcgtgaactggcgccggacccggccactcgcatcatcgtcaactgcgccgggcgcacacgcagcattatcggcacgcagtcgctgatcaatgcaggggtggccaacccggtatccgccctgcgcaacggcaccatcggctggacattggccgggcagaaactcgcccatggccagtcgcgccgctttgcgccaacgtccgaagagcaccgccaaattgccgccgtgcaggcgcgccgcgtcgccgacaaggcccgcgtgggccgcgccacgctcgccgacctgcaaggctggcagcaggaggcgacgcgcaccacctacctgttcgatgtgcgcacgccggaagaattcgaagccggccacctgccgggcgcacgctcgacgccggggggccagttggtgcaggaaaccgaccacgtcgccagcgtgcgcggtgcgcggctggtgttggcggatgacgatggcgtgcgcgcgaatatgtccgcgtcctggctggctcagctgggctgggaagtgcatgtactggatgatttgcaaccggtgaacttcagcgaaacaggtgcctgggtcgcaccagtgccggcgccacagcaagccgaactgatcagcccgcacaccctcgccgactggttgagccacggcgacacggcggtgctggatttcaccccgagcgtcaactacgtcaaacgccatatccccggtgcctactgggccttgcgtgcacaactgcccgacgccctggccaacgtagcgcccgctgaacgctatgtgctgacctgtggcaccagccagctggcgcgcctggcggtagccgaagtcgaagccctgaccggcaagccggtattcctgctgcaaggcggcaccctgaactggatcgccgaaaaactgccgctggaagaaggtgaaacacacctggcttcaccgcgcatcgaccgttaccgccgaccttacgaaggcaccgacagtccgaaagaggccatgcaggcctacctggactgggagttcggcctggtcgaacaactggcccgcgacggcacccatggcttttatgtgatctgacccctttttacagccccccactttccacccatggccgaccccttctccaggcggaggcgactgaattcagtacctagcctggagctaccttgatgcgcctgacactgcccctcttactgatcgcccttctttcaggcatggcccacgccgccgacctgcaaccgctgcgggtggccaaccagaaatccaccatcaaagcgctgctggaagtctccggcgaaaccaaaaatgtgccttacgaaatccagtggtcggagttcccctccgcctcgccgctgggtgaagccttgaatgccggcgccgtggatgtgggcgccctcggcgacgcaccctatgtgttcgccctcggcgcgggggcctcgctcaaggtggtcagcatcatccacgccgaagggcgcaacaccacggcgttgctggtgcccaaggactcgccgatcaagaccgtggccgacctcaagggcaagaaaatcgtcaccgggcgcggctccatcggccattacctggcgctcaaggccctggccagcgcgggcctgagttccaaggacgtcgaatttgtattcctgttgccggccgagtcgcgcctggtgctggacaacggtaccgttgatgcctgggccacctgggacccctacaccaccgtcgtcacttcacaaagccaggcccgcgtgctgatcagcggcaacaagctgttgagcaaccacctgtatttcgccgcgaccagccaggccatcgccgacaagcgtgcgcaactcgatgactttgtggctcgcgtcgaccgcgcctacgcctgggccaacgtgcaccccgatgaatacgccgccgcccaagccaggatcaccggcctgccgctggccgtgcacatcgaagtcgccaaggatactcacctgagcccggtcaccatcgacgacagcgtgatcagcggcctgcaagccactgccgacacctaccaaaaagaaggcctgatcaccaaacacatcgatgtgtcccagggctttgacaagagctttaacgccaagcgcgtcccgctgtcccaagcctcacgctaacaaggagcagaacatgagcgagccacatcaatcaaagccgcgccatttgaagctgggtgccatggtccacggtgtcggccacggctggggcgaatggcgccacccgcaggcgcaaccgaatgccagcacgaactttggtttctacaagcaacagactgaattggccgaagccgccaaattcgacttcgtgttcatcgccgacagcctgcacatccacgccaagtccagcccgcattacctcaaccgtttcgagccgctgaccatcctctcggccctggcggcgctgaccacgaacatcggcctggtcgccaccgtcaccgtcagctacaccgagccctaccaggttgcccgccagttcgcgtccctggaccatatcagcggcggccgtgccggctggaacgtggtcacgtcctggctcagcggtaccgccgacaacttcggcaaggccgagcacccgccgcacgccgtgcgctaccgcatcgccaaggaacacctcaatgtggtcaagggcctgtgggactcctgggaggacgacgcctttgcctacaacaagcaaagcggcgagttcttcaccccgcaaaaactgcacgcgctaaaccacaagggcgagtttttctcggtcaaaggcccactgaacatcgcccgctcgcgccagggccagccggcgattttccaggcaggcacttcggaagacgggcgcaactttgccgcagaacacgccgatgcgatcttcgtgcacgttgaaaacatcgaagaagccaaaacctacaccgctgacttgaagcgccgcgccaagggctttggtcgtgacatcaacagcctgtcgatcctgccgggcatccgcccgattgtcgggcgcgacgaggccgaagtcgaaagccgttatcagcaggccgtggagctggtgtccatcgaggacgccatcgtcgccctcggtcgcccgttcaacgaccatgatttcagccagtacccgctggacgaaccgttcccggaactcggcgacctgggctccaacagccagaaaggcggctccgaccgcatcaagcaactggccagggacgaaggcctgaccttgcgcgaagtggccctgcgtttttcgcggcccaagcgtgattttgtcggcaccccggcacaagtcgccgatgcgatccagacctggttcgaaaccggagccagcgacggtttcatcatcaactcggtgctgccggacggcctgcaatatttcaccgaactggtcgtaccggtgctgcaacagcgcggtctgttccgtagcgaatacaccggccataccctgcgcgacaacctgggcctggaggtgccggccaaccgttacagcgccgccgcagagacagaatcggtgttgtacgcagtgaattaacgccggcgtgctgagtgagcggttggatatcagcccattgtgggaccggcaattcaagttattgcctcctctctgacaacagtcaacatcccctgtgggagctggcttgcctgcgatagcggactatcagtcactgcaccgttacctgaaccaccgccatcgcaggcaagccagttcccacatttttgaccgagtacatccccatgacttcacacccctcattacgctccgtggaagtagccaacttcgaagccctgctcgaccgcctcagcgccgaactcgccgccaccgcccacctgtacgacgacagcggcgccttcccccatgcaaacttcaaattgctgcatgaccacggtctcgtcgccctcaccgtgcccaaagccctgggcggtggcggcgcgagcttgccccaggcgcgcaaagccatcagcgcaattgccaaaggcgaaccgtccactgcgctgatcctggtcatgcaatacctgcaacacacccgcctgcaagacagcaagacctggcccgaacacctgcgcgtgcaagtggcccaagacgccgtacgccagggcgcgctgatcaacgccctgcgcgtcgagcccgacctcggcaccccggcccgtggcggcttgccagcaaccacggccgtgcgcacggccgaaggctggcgcatcagcgggcgcaagatctactccaccggcagccacggcctgagctggttcagcgtgtgggcgcgcagcgacgatgccgacccgctggtcggtgcctggctggtgcccaaaggcagccccggcgtgagcatcatcgacacctgggaccacctgggcatgcgcgccacgtgcagccatgaagtggtgttcgacaatgtgctggtgccgctggaccacgccgtcagcgtcagcccgtggagcgcgccgtcgccggagctggatggcgaggggttcctgtggatgtcggtgttgctgtcgtcggtctacgacgcggtagcccaggctgcacgggactggctggtgaactggctggagacgcgcacgccgtccaaccttggcgccgcgctgtccaccttgccgcgctttcaggaaaccgtcgggcatatcgataccctgctgtttgccaaccgcagcctgctggatgccgccgccgaaggccgcaccccggcggccaacgccgcgcagttgaaatacctggtgaccggcaacgctatccgcgccgtcgagatggccatcgaagcctcgggcaaccccggcctgtcgcgccacagcccgttgcaacggcactaccgcgacgtgctgtgcagccgcgtgcataccccacagaacgacgccgtgctgctaggtgtcggcaaagctgtcttcgctcaacgtcagaaggaacgcacatgagtcaggtgattatcgccagccagctggacgaagagttcaaccaggtaatccgcgagcgcctggcgccgctgcaccctgaagcccaggtgattggcgtgccggtcggggtgccaagcgacctgccgccccacgccaacatcctgctgttgcgcccgatcaatgtgcgcggttacaccgcaccgcataccccgccaccgggctggccatacggcgcgcagtgggtgcatctggtgtcgtcgggcatcgacttctacccgcagtggctgttcagcggcccgccggtgaccacctcacggggcgctgccgccgacaacctggcggagtttgctctggcggcgatctttgccgcctccaagcatttgccggatatctgggtgaaggatgcccagtggaacttcaccgcgctgcgcccgctcaagggcaccaccctgggcattctcgggtttggcgcaattggcaaaagcctggcgcagaaagcgctggccttggggatcaatgtggtcgcgttgcggcagagccaggcaccgttcgaggttgaaggtgtggaggcggcgaagggtattcacgacctgttcgcgcgcgccgatcacctggtgctggccgcgccgctgaccgcggccacgcggcatattgttgaccgcgacgtgctgggaggcgccaagccggggctgcacctgatcaacattgcgcggggtggtttgctggatcaggaggcattgcttgaatcgctggagaatggccggattggcctggcctctctcgatgtgacagaacccgaaccgctgccggacgggcacccgttgtacagccatccgcgggtgaggttgtcgccgcatacctcggcaatttcgacgaacagcgcgcatgagattgccgatacgttcctggcgaatctggagcgttatctgaacggttcgacactcgccaacctcgtcgaacgctgaatcaaacaccgatcaaaactgtgggagctggcttgcctgcgatagcggtgggtcagttggcacaatttcaactgatagattgctatcgcaggcaagccagctcccacctttgatcgttgtcgggttcaagaatgttcagcagccaccggccaggcgctcacgcaggaactccaccagcgcctgcaccggccgcgaactctggcggtgctggggatacaccgccgacagcgtcagggcttcgggcgcaaagtcctccagcaccgctaccagccgcccatctttcaaggcatcggcgacgataaaggtcggcaagtacgtcacccccagcccggcaatcgccgtgtcgcgcaacaactcaccattgttgacgcgcatgcgcccgctgacattcaccgactgcagcttgcccttgatctggaaacgccattgcacctgacggccatggccataaggcaggcagtcatggtcggcgaggtcttcgggcttgaacggcgtgccacgcagggccaggtattcggggctggcacagtacacccgttgcacgctggcgatgcgccgggcgatcaaggtcgagtcttcaagggtgccgatgcgcagcaccaggtcgtagccttcgccgatcaggtccacggggcggtcgctcaagtcgacttccaccgagacgtgcgggtgccgttgcagaaatagcggcaacaggcagcccaagtgggccatggcaaacgacaagggtgcgctgaggcggatagtgccgcgcggctcgctgttctggccggcgatgccctgctccacttgctcgacttcaccgagcaggcgcaaggccgattcgtagtaactctggccgagtggcgtgacatccaggcggcgcgtggagcggttgagcaggcgcacgcccaggcggtcttccaactggatcaggcggcgactgacaaattgcttggacaggcccaattgctcggcggcggcggtgaaactgccggattccatgacctggcaaaacaggcgcatgtcttcgaagggattcattgtcgctactcggtggacatttggcgggtttatagcctgtcggcggccacaccacaaaccaaaatgtgggagctggcttgcacagggttgattcggtgttctgtaaagcaagttatggaaaacacctcgagcggcccggccatgtcgaacaggaggaaatccggaaacagcaccatggccacggttttcataaggggaagcctccatcgggaagaaaggcggtgggcattgtggcacgcctttaactgtcaaccttaaaaggacagttattcagatttcagcttcttaatgaatatttcagtaaccagtaatcttcttctcaacgcaagcgctctgcatctcgcagcccacgctcacttgaggacgaaatcatgctgacccttcgcaaagcttccgaacgcggcgccgccaatcacggttggttgaagtcgtttcacaccttctcgttcgccaactactggaaccccgacgagcagggtttttccgacctgctggtgatcaacgatgaccgcgtcgctgcgggcaaaggctttggccagcacccgcaccgtgacatggagattttctcctacgtgctcgacggcgccctggaacacaaggacaccctcggcaccggctcagtgattcgccccggcgatgtgcaactgatgagcgccggcagtggcgtggcgcacagcgagttcaaccacagccagacccgtggcgtgcacttcctgcaaatttggattgtgccgaatgaggcgggcgccgaaccgcgctatcagcaagagcatttcagcgaggcgcagaaacgcgggcgcttgcagttgatcatctcgccggaaggcaccgacggttcgctgcaggttcgccaggacgcacgagtgtatgccgggctgttcaacggcgatgaaagcgcgagcctggcgctgccgcccaaccgccatgtgtacgtgcatgtggcgcggggcagcgtcgaggtcaatggccagcgtttgcaggaaggtgacggcgcccgagtgcgggatgaacaccagattcgcctgagccacggtcaggatgccgaggtgctggtattcgacctgcgcccacaggaactgccgcagatgccttgaccctcaccgcgatgatccgccccaaaacgggtcatcgctggcgtcgatagtcaccatcagtgcaatgaagttctcttaaaaaacctagcgcgtaacatcaactccatacccagcggcacccaaactaaaacactcggagcacaccatcatgaaacgccaaatcttgcttagcctcgctttctcggtacttgctgcaaacgcttttgcccaccctgttgtcgctgaaggcggcgcggatcgcctgatggaaagccgtgttgccgaaaacggttctgatagcctgatcgagcgtcgtgtcgctgaaggtggtgcggatcgtctgcaggaacgtggtctggctgaaggcggtgcggatcgtctgcaggaacgtggcctggctgaaggcggtgcggatcgtctgcaagagcgtggcctggctgaaggcggtgcggatcgtctgcaggaacgtggcctggctgaagggggttccgaccgtctgcacagcaacaacgcataaccctcgcggttggcgaggcaccccaaaccggcctgatcagccggttttttttcgcctttgattaatgcaagtcacggtcaacccagagcaccgccttgccgatctgctgccgcgcctcaatgcgttcatgcaccttctgcacggtttccaatgtgtaatgcccttcgatctccacggtcagcgagccttccagcatcgccgcgaacaccgcgttggcacgccgttgtacggtcgggccgtcggccatgtggtcggccaggcgcgggcgggtcaggaacaacgaccccgcctcccccagttcaatcgggtccaggtcggtcaacgagccggaaacattgccgtaattgacgatcagccctcgcgtgcggcaggcgcggaaactgtcgcgcagcgtggctttgcccaccgaatcgaagaccacgtccacgcccttcccgcccgtcgcctccaggacacgctcggcaaacccgccagcgtcatacgtccaggcctggtgagcaccgcgttgcagggcgatcgcacatttctcgacggtgctgcctgtggtgaataccgtcgcgcccagacgacgcgccatttgcaccagcaactggccaatgctgccggacgccgcgtgaatcaaacagctactgccggcctgtagccgcgccacatcatcaatcaagtagtgggcggtgcacccttgaaacatcgcggcggcggcctgatcgaaggcaatggcgccggggatctgcgcgactttctcagccggtacattggcgtactcggcatacgccccccacgcgatgcaccaggctacccggtcgccaacggccagatggctgacacccgcgcccacctccaccaccacgcccgcaccttccatgcccaaggtgcacggcaagcgcaccgggtaggtgaccgactgcgcgtatttgccctggcgggtatggatatccatgaaattgatgcccgcgcaggccaccttgaccagcacgtggcccggtaaaacctggggtttgggtacatcgaggcgcaaatgtgcgacgtctggtccgccataagcttgcaaggtgatggctttcatcggggaacaactccgtttgcactgggaagcggccatggtaaaaggaccttctcagtaggaaaattccccaatacctcccagactctgtgcggaaacaacccgatgttcgattggcaggacctgtattacttcaccgtactggcacgcacgcagtcgctgtcagcggctgcccgcgaattgcaggtagaacatgctaccgtcgggcggcgtgtggatgcgttggaaaaagccctgggcgtaaagctcgtcgaccgtttgccacgcagccggcccctcaccgcacaaggcctggccttggcagaactggccgcgggaatgggtgaaatggccaccgaagtgatgcgcctgtcgcgggtagcctccattgaaatggccggtacggtgcgggtcagttgcccgccctccatcgccaaccattgcatcgcgccccatgtggcgcggttgcgcgctcaatacccgcaactgaacctggtgttgctgccttccacccaactggccgcgctggacaaaggtgaagccgatatcgcgttgcgcaccgtgagcccggatgaagacgcgctggtacggcgcaaggtcggcgcggtgcgctttggcctgtatggatcgcccgagttacagcaaaagcctgccgcacagtgggcgtttatcgcctatgacagcagccgcgatcacctgccccaacaggcttggctgcaccaactgcgcggtgcgcgcccaatcgtgtttgccgccagcgaattgatcacccagcaaatggccgcccgcgctcacgttggcgcggtagtgctgcccaccttggtgggcgatcacgatcctttattggccaggctgccagtcacaggcgagggcccggtgcgcgatatctggctcacggtgtacccggacatgcgccgctcgccgtcggtgaaggtggtgatggagtttttggtggcgtgcattgaaggtgagcttcaactgcgccgttgacgttttttcaggttggcttctgcgtcttctctcgccaggtaaagaaaccctttaccttcctgcaccttgaacagcagtttcatgccaaccagtttctcaaggtccttgcgtgcggtattttccgaaatatcgtagtcgtgggtgagttctttgggcgtgaatatgcggccggggtgctggagtactttcttcaaaaaatgcccctgccggtaattcagctcattgttgagttcaaacgtatccagccagctcatcagctccacggattctctgcgcttggcctcgaaatactccatgaactcatgcatggcgcgctcaatgacccgtagctgatacgtcacgaaataggtcaagtcaaaggcgtcggtttgcgtgtaaatgtatgaccgcccatattgcatgggcgcctctttgagcagtgtgctgatggagatgtactcaaaaggccagtaaccgctcttaagcatgaaccagtaaaacaagcagcgcgcagttcgcccattaccgtctcgaaaggggtgctcataacccatcatgaagtgcaggatcgtggccttcaccaccgggtggataaaatgcctgccttcatgaccatcatgacaatcattggcaaaccggcagagcgcctccagcctggcaggcagcagcgcagccttggggggctgatgaaccacttcatcgcctgccccgcccacgaaaatgtcatcactgtcccggacctggccagggcaggagtccgcctcatcaatgctggccgtagcgatagcctgaaattcgcagatcaaagcaaccgacaggttctcatccttgttgtacttggcatgcttcatcaacagatagttattcagaatcatccgttcatcatcgtcctgaggcatgcgctccttgcccaacatatcctttgcaattttgcgggtcgtcgcagcaccctccaattgagcgctggaaatcgcctcctccatcatcaatgaatcaaccaggtaccgggtgttatcacgatattgcggggaggacgccttcgccccgcccaacctggacgtcaccgactccacagcgtgaataaccgcatcgcaaaagtcggtagtggacaagaaaaaagggctgccgcattcgctgcgaagttcgagtgtcttgctccccagggctcgggacatcttgatagctgcccatgcggcttctttgttcacgcccggcgaagggtaccggcgaaattcgtcccaatgcaggtatcggcctttgtcgtcgacggccttgtaagtgcgggccagctcaaaaatctccaaaccatattgctttagcaacacagcgaaatcagcgggcttttggattctggccatcgttgaaactcaatttttgaaaattgagctgatggttgcgcgcgaaccttacagagtcaagcgttaacccgccagaaactgtaccaacgcctggcccaaaccatcaaacaccgccgccacccgcggcacccggcgcatgtcttgatgcatggcaatccacacatccacgtcgaaccccacttcaggcaatacccgcaccaggccatggcgctgcgccaattggccggggcatgcgccgatacccaggccggcacgcacggccgcgaactgcgccaggtggtcgtcgctgcgaatgaccgtgcgcgccgcgctgcagtcgacaccttgctgctggagaaactcgatgtcttgcccgttgcggtcgggcccgatcagcggatagccccgcaactgggccaaacggtcgggcgtgccacattcggcgagcaattggggggcggcatacaggccgacgtgcaggtcgccgactttgcgcgtgaccaccgtggcctccgttggccggcgaatgcgcacggcgacgtcggcttcctgttgcgccaaggcctgcaggcgattggagacactcagttcaatcgccagtgctggatggtcgcgcctcaacgtgcgcagcatcggcggcaaaacttcaacacccagtaactggccactggtcaggcgcacggtgccgcccgccatggccgcgtctgccgaggccgcgcggttaaaggcattggcggcgacggccatcgcctctacatggcttatcagctctcgcgccatgtcggtgggcagcaagccttttggcgaacgcacaaacaggctgaccccgacgctctgctccagcgcttcaatgcgtcggcgtgccgtggcctgggcgatccccagcaaacgcgcggcgcccgacaggctgccggtgcgcagcacggcgagaaaggcacgctgggtttcccattgcagttgaggggggttcatacatttcctgtgagccgctgggcagttttggcgaatgttcagcgggcacccgctgaggcatgctggcgagcatacccgatgggccttgcgccctcttctgactgaaggatcaaattcgatgattttcaccggccaatgccgctgcgccgccgtcacataccaactgaatatggacgcgttaccggcgatttacgcctgccattgcaacagctgccagacctggagcggcagtgcattcgccctgcatgccttgctgccggcggatgcgttgcaggtggccggccccgtcactcagtacgcttatgaggttgacggccaacgcagcgagcatcagctttgcgccgtgtgccatacccgcatcagcaacaccaccaccgccgcgccggggttgcaggtactgcgcgtgggcaccctggacagcagcccgtcgctgcaaccgctcgcgcatatctgggtctcgcgcaaacagccttggctgaccttgcccgagggcgtcccgacgtggccgcaaagccccacccccgaagccttcgcccaggcccttacgcctcccgcgccttgaccttcaagtgtcgcgcgtaccaggggcgctgcggcacacgcttgaacaggcctttgagcacaccctcgtccgacccaaaggtgatgcgcaacgcgagtttcatggtttccgggtccatctccatggagcgccccatctgcagccccggtgtggtgctgcagccatgggtgtccgggcccagccacggatcactcacttcaacccaacgccccggcgcaaaccactgcacgccgttgacttcaagccggctgacttcacccgggttgaagcgctcgtgggcgcgaaaccagtcttcgacacggtcatcgatccagccgtggaagtgccagaacaccgggttgacgtgggatgagaacggatcgccgagaaaatcgttttccgccgcgtaccagcgcgcggcaaagtctgccgggtcgcgagcgaagggcaccggcgcgccattggacgggtcacggggcaccgaggcccagcgcatgtgcagccagtcgtgcaagcccagttccatttcggagcccagttggccgagggtcagtttggccaggtagcgcgggtcgcggtattgggattcccaaacctggaaattgctgtggtaggtctcggccgccttgatatcgctgacccactgggtgtagtcggcgtcgtccggggcggaccaggtgggcggcagcgcgaacccgtcgcggttgtcgaaatagcgcaagaaacccaggcggtcgcgctccagcgccggctgtggctcaggaaaagccggccacgacggcaggtcctgcatcgaacgcgccgtgcccagcatgtgccggtgcatgaagaaaaaatcgatacccgaaccattgcggtccttgcgttttccccgcgcatcacgctcctggccgcgcggcccgggttgccagccgatgccgcgcagggcgtcgcgtttttcctctgacagcttgtgccactggtcacgggtggcgtgccacagttggtgaaacaagcggtgttccggcgagatcagccaggccagcagcgtcgggttgaggccaatgcgctggcgggcttcgggaaacagttgtttgtgggcgataaaacggttgtcgcgctcggtcaacgccagggggcggtccaggtccaggatctgcccgctgagggtgccgctgccggcattgccgaagtcggcccagacttcatccaccgtcatcttgaattcataggcgggcacgcccgcgaccgagtcgcggtcgatcaggcgccaatacagcaccttgccgtcccccgtgagcagatcacccagcacccggtaacggggctcggctggcgcacgcaggttttcggcggtgtccaggtagccgcgcaggccacggccacggggggcgatgtcgagcagcaactcaagaccttgcaatggcaagcctttgagacctgcgccggcgccttcgaaacgcaggctccacacgcccctgagccggtttgccaggtgctggccggccgtgtcggcgaggtccaccgtggcttcaccgggggtgatcggaaattcttcgcgcgtcagctcgcgatgggcataaaaggccgccggcacggcagcgccggtcagcgccaggcctgcgatgaacccacgtcgagagatggtcattgtctaccttaggaaacagcttgatcagagctagaacgtttgcagccgcgcaaaatttaccaacgcgccctgcccacctaaatttcccccgccatcactcgttcttccctgatagcaaaggcctcaactgactgagatggcaatgacaaaaccacgttcgaaaaaggcgctgtatctgggcctgccgctggcactggcggtctgcgccggcgccggttttctggtctgggatcactggttcaagggcaacgccggctacccgctggaggtgatcaagcaggccaacgagatgcaggaccgcttgttgtcctttgacagccatatcaccgtgccgctggatttcggcaccgcaggcaatgaggcggacaaggacggcagcggccaattcgacctggccaaagccagccgcgggcgcctgtcgggtgctgccctgaccattttcggctggccggaaatctggagtggcgccaacgcgccccataaaccgaccgaaggttttgtcgaagaagcacgccatgagcaggaagtgcgctacaaaatcatctccggcatggtgcgcgactaccccaaccaggtcggcattgcctacactccggacgatttccgccgcctgcatggcgaaggcaagtttgccattttcatcagcatgctcaacgcctacccattgggcgatgacctgaaccagctggacctgtggaccgcgcgcggcatgcgcatgttcggcttcagttacatcggcaacaacgcctggtccgactcatcgcgcccgctgccgtttttcaatgacaccaccgatgccctcgaaggcctctcgcccatcggccagcaggcggtgcaccgccttaatgaccttggggtgatcattgatgtgtcgcagatgtcgaccaaggccgtggaacaagtcgcccggttgagccgcacgccgatggtcgcctcgcactcggcgccgcgcgcctcggtggatatcccgcgcaacctcagcgacaaggagttgcaactgatcaagaacagtggcggcgtggttcaggtggtgggtttcccggcctatctgcgcccgctgagccaaccgacccaggacaagctcaataccctgcgcgcgcgcttcgatttgccgccgctgcccaacctcgccatggcactgatgccgggtgacgcgatcatcgccgcgtggcccgagcagaagttcggccagtacgccagcgcgctgtacgccatcctcgaagaggagcccaaggcgaccctcaaggactttggcgatgccatcgactacaccgtgcgcaagatcggcattgatcacgtgggcatcgcgtcggacttcaacgacggcggcggcctccagggctggaacgatgtcggcgaagtgcgcaacgtcactgccgaactgattcagcgcggctactccgaagccgatatcgccaagctgtggggaggcaacttcctgcgggtgtgggaccaggtacaaaaagccgccaagccattggccaaccgctaacgacccgtgaagtaagcccatgaccgaccgccgtacgtttctcaaacaggctggcgtgctcgtcgccagcctgccgctgggcgccgccctcacccctcaggccatcgcggccaccccggcaggtgacccatgggcagcactcaaacagctgttcaaccaggacccggattacctgcacttctccaactttctcgtggcctcgcaccccaagccggtgcgcgaagccattgagcgctaccgcctgcagatcgaccgcaaccctgggcgtgccatggactgggacctgcaagagaccttcaagcgtgaaggccaggtgcgcgaatgggccggtcgctacctgaatgccaagcccgctcagatagccctcaccggcagcacttccgaaggcctggcaatgatctacggtggcatcaaggtgcggcccgaccaggaaatcctcaccacggttcacgagcactatgcgaccgagttcagcctgaatttccgtgtcgcgaaggaaggcacgcaagtacgccggatcagcctgttcgagaacgccgcccgggtgtccgtcgacgaagtgctcggcaatatcaagcgcaatatccgccccactacccgcgtgctgggcatgacctgggtgcagtcgggcagcggtgtgaagctgcccatccgcgaaatcggccaactggtggacgaacataaccgcgaccgtgatgacaaggaccgcatcctctacgtggtcgacggcgtccacggtttcggcgtggaaaacctcgatttcccggcgatgaactgcgacttctttatcgccggcacccacaaatggatgtttggcccacggggcaccgggctggtgtgcgcccgtgacagcgaaaacaactacgtcacgccgatggtgccgaccttctccgaagacaccaatttcgccaccaccatgacccccggcggctatcacgcgttcgagcatcgctgggccgccgacgaagccttcaagctgcatttgcaattgggcaaggcgcaggtgcagacacagatccacgcactcaacaccgagctgaaaaaccagttgctggcccacccgcagattgagctggtgacgccgcgcagccctgaactgtccgccggttttacctttttccgggtcaagggccaggacagcgatgacgtggcggcctacatgatgaaaaaccgcgtggtgattgacgcggtggaccgcgacgtgggcccggtgattcgcaccgcgcccggcctgctcaatagcagcgacgagatccagcgcttcatggcgttgctgacggcgcgcctgtgaccttccttttcctttgaacgagatgcccgcatgaacccatcccgactcaaaccgctgaccgccctggccctgaccgccctgtgcggcgcattgctgcccaacctggcccacgccgccacgccgcaacccggcaaagtgttcaaggactgcaaggactgcccggaaatggtggtgttgccagccggtacattcaccatggggacgccggaaggcgaagtcggccgtgaaccggatgaaggaccaatgcacgacgtgaccttcgccaaacctttcgccatgagccgcttccacgtcacggccggtgaatgggacagctacgtgcgccagaccggcgtcaagattgccaatggcgatgaccgccctggccgcgaatgcattgccagcaagccgcgctacccgcaagggccgcgccaaccggcggtatgcatggacatggacgacatcaaggcctacgtggcctggctgtcgaaaaagaccggccagcactaccacatggtcagcgaagcgcagcgcgaatacgccgcccgcgccggctccaccgggccattccccttcccttttgatcaaggcaaggaatacagcatcgccgagcacgccaacacctacgggccggcggacggctacagctattcatcgcccgtgggcagctacccgccgaacgcgtttggcatgtacgacatgcacggcaacgtctacgaacgggtcgccgactgcgagcaccccaactatgtgggcgcccctaccgacggcagcgcctgggtcgagccgaactgcgagtcctatcagattcgcggcaacgactggggcgaagcaccggtgttctcacgctcgggcaaccgcaataccatttacccgcagacacgcggtgactggatcggcttccgggttgtacgcgacctctgatcctaaccgcataaaaaaaccgccgggtgtgagccggcggtttttttatgcccggagaaagccggcaaacgtgccggcttcccgtaggtcagccgatcagaaggtccacttggcgttgaccatcgcgttgcgcggctcgccataggagcccgagttgaacgtgcccatgccgtcatagtacttctggtcaaacaggttgttgacattcacccccacagtcaggtgctcgtcgaccttgtatctggccaacaggccgaccacagcgaatggatcctgtgtggccttgtagtaagggcccgagtagttgatttgcgacgaagcgtacatctcgctttgccaggtcacattgccaccaatggtcagcttgctccattcgcccggcaggcggtaagtggtgccgaacttgaacaggttgatcggctggttggtctgcacgcggccaccgtccttgtcatgggactcgcggtaagtgtagccaccaaacacgttccagccgctggccacctcacccgaaatctcggtttcgacgccgcgggtgttggtgccactgatggccttgtacacggtgcggcccgatgagtcctggcccgactcctgcggcgtgttcttctgctcgatgtcgaacaccgcaatgcttgcgttcagcgcaccgttgaagaactcacccttcaagccgatttcgtagttgtcaccttcaagcggcgccagtgaaccgcccgctgcggttttgtagaaggtctgcggcaggaagatgctggtgtagctcgcgtacgccgaataggtgtcgttcagctcgtagacaataccggcataaggcgtgacaaccccggtcttcttggttttgtcggttgccttggtgccattgaggtaattgctgacttcgtcttcctggttccaccagctcaggcgcgtgccgaggatgatggtcagtgggtcgaacggcttcaggcgcagggcaccatacatgccggtctgctgcaaggtcgtgacggtgccaccatccttgaagtacgaacgacgcgggtactcattgccgttccagtcgaacaggttggccgacccgtagtcgccatcatcgttgtgactggaatagttggggaagttcaggtgagtgcgcgacgtgctggcaccgacgaccagctcatgctctcgaccgcccaggttgaacgggccggaggcataggtatcgagcgtatcctgggtctggtagctgtccaggcggtagatgaatacgccagtgcccgcaccggttaccgggtccgggtaaccgccactggcggatgcgccctggcctttacggtaggaatattgatggctgtaggccgtcttcaggctccagtcactgtccagcttgtggtcaagcatggtggtgaagttgtagctggtgttgtccatgtaactcgagcgcgaagccgggttgaatgaacggggcatgttggtttgcttgccattgctgaagaacagcgggatatgcccatagctggtgccattggcatcgttgttctggtagtcgaggctggtgcgcaaggtggtgctgtcgttcaggtcgatgtccagcgcgccgtacattacgcgcttttcctggctgtaccagtcgacgaacgaattctgcttctggtaggccgccacgaaacgtccgcggacattgccggtttcagtcaacgggccggaaacatccacttcggaacggtaacggtcccacgccccggcttcgccggaaacgtagccctggaagtccttggtcgggcgcttgcgcaccaggttgatggtggcagacggcgtgcccgccccgctcatcagaccggtagagccacgcacgatttccacgcggtcatagatcgacatgtccgaaagcggccccacgtattgctgggactcgttggcgacctgcgaaggaataccgtcgtactggaagttctggatggtgaaaccgcgagaattgaaatcgtaccgctcgctgtcgcgatggttgatgctgatacccggggtgaaggccattacttcgttgagcgtcgacagatgctggtcatccatcaactggcgggtcaccacgctcaccgactgcggcgtttcacgcaaggtcaatggcagcttggtcgccgtactggtagcgcccgtggtgtaggaaccgctgttttcagtggttgccccaagcccctcggcactgatattggtcgcgcccagcgtcacggccgagccactggaaggtggcatcacgacatagctgccattggcctcgcggctggcctgcaagccactgcccgacaacaaccgggacagaccgtcatccacgctgaactgcccctgcagcccgggggtgttgcgctggctggccagggccgggtcgtaggaaatcgacacgccggcggccgaaccgaacttcatcagcgcgtccgataatttaccggccgggatcgcaaaggccaccttgcccgcttcgctctgggcgaatgcggcgctcggcatcaacgtggcagcggccggtaccgccagcgctgcacccagcatcatcaggcgcacggtctgcggcagtttcttcaacgcgtaatgcttgggcgtggacaaccaaaggggataaggcatcgacagcaatccttgaacaatgaggcgtgtgattggcagaaatagcggcgtctttgagcgcctctggtggataagacggctcagctaatgaaaaccagactcatttactccgatttttttactgtcctgtcggatcgtgcaacgcccgccctcaagccacgcaaaagccgaaacgccgcattcacaagaaaggcacaagagaaaagtaaaaaagcaggccgtatcaggactgaaacgttggggcgaaggaaaaatttaggaccacaccaacagccccgccccccccggcctccacgaacgcatttcgcagccgcccacgcagcacaacaaggctaaatcgcgccaccctcgaaacgtctcctacaaaagcccgccagcgacctgatggttcgcctgggcacccactcgcccccagcacgtagccacgtcgcgaccgaggtagtttcatgactgcaaaaccgcgtagcgcccttcgcgaactcttgagcctgctcaagccctatcgctacaccgtcattctgtcgattctgttcggcatcctcggaggcctgagcgtcaccgcgctgttggccacggtcaaccagggcctgcacagcgagtccggcctgaccaccgccgtggtcctggcgtttgccgggctgtgcgtgctggccttgctcagcagcattgccgcagatatcggcagcaactttgtcgggcaaaaagtcattgccaagctgcgcaaggacctgggcgccaaggtgttgtcggcgccgatcgaacagatcgagcgctaccgcagccatcgcctgattccggtgctgacccacgacgtcgacaccatcagcgatttcgcctttgccttcgctccgctggccatttccatcactgtcgttctaggctgcctgggttacctggcgagcctgtcgctgccgattttcctgatgacgctactggccatcggcatcggctcggccatccagttcgtcgcgcaaggcaaaggcatcaaaggcttttatgccgcacgggaatcggaagacaacctgcaaaaacactactcggccattgccgaaggcgccaaggaattgcgcatccatcgcaagcgccgtcacgccatgctgacgcgcaacatccaggcgaccgccgaccacatctgcgacacccatgtgcgttcaatcaacattttcgtgatcgccaagagcctgggctcgatgctgttcttcgtggtcatcggcctggcgctgaccctgcaatcgttctggcccagcagcaacccggcaatgatgagcggctttgtgctggtgctgctgtacatgaaaggcccattggaaaacctgatcgccaacctgccgatcatcagccgcgcgcagatcgccttccgccgcattgccgacctgtccgaacgcttctcctcgccggaaccccacttgctgctcgatgccgacgaaagccgcacccccaccctgcagcacctggaactgcgcgaggtgcaatatgcctttccacccgtggagggcagccagccgttcaagctgggcccggtgaacctgaccatcgagcctggcgaaatcctgttcatcgtcggcgaaaacggctgcggcaagaccaccctgatcaaactgctgctgggcctgtacaccccgcagcaaggcgaaatccgcctcaacggctgcgccgtggatgcacgcggcctggatgattaccgccagatgttcaccacgattttcgccgactactacctgttcgacgaactggtgcaaagcgacaaggccctgccggacgatgccaacggctacctggaacgtatggaaatcgcgcacaaggtcagcgtgcgcgacggcgccttcaccaccaccgacctgtccaccggccaacgcaagcgcctggccttgatcaacgcctggctcgacgaacgcccggtgctggtctttgacgagtgggcggccgaccaggacccgacgttccgtcgcgtgttctacaccgagctgctgccggacctgaagcgcctgggcaagaccatcatcgtcatttcccacgacgaccgttacttcgatgtcgccgaccaactggtgcgaatggaagccgggcgcgtcatcaccgaaaaagccgtcgcctgattcctccctcacggcgagcgccctgccgctcgccgcctgcctctgaagtccgcgtcacacctaaatctcgtcggccatgcttcgtctttctgacaacgcatatttacgcagccgatggcgacgagacccaccatgaacccactgaatcaactccccgacgacgacctgctggccctgttgatggccgacgacgccggttcagagcattccatcaaggctcactcccatcgcggccccacgcccctgtcttttgcccagcaacgcctgtggttcctgcaacagctttcgccccacagcagcgcctacaacctgcccaacgcgctgcgcctgcgtggcacgctgaacggcgccgcgctggacgcggccctgcagcagattatcgaccggcacgatgtgctgaaaaccgccttccaaagcgttgatgatcagccccggcaaatactcgacccgcacgcccgaatcccgctgcacaaggcagacttgtcaggcctggcgcccgaggcccgtgccatcgccgtcgctgaacgccttgccgccgaagcccgcgcgccctttgatctgagctgcgcgccactgatccgtgccacgctgctcaccctcgaacacgatgagcatgtgctgctgttgaacatgcaccacatcgtttcggacgcctggtccaacccgatcctgatgcacgacctgacccaggcctaccagcgcgcctgcgagggcgacaccacgccactgacgcgccccgccattcagtacgccgactacgcccgctggcagcgcgaagactacccgaacacgcctgagcaacagcgggctaccgactattgggcgaattacctggggcgtgaaatgcccacgctggacctgcccaccgattttgcgcgcagcgccgaacaacggcaccacgccggcaacctgcacctgcccttgcccccagccctgagccaacgcttgcaaagcttctgccagcaacaggatgtgacgccgttcatcgtattgctgggcgcctggcaactgctgctcagccgctacagcggtcagcaggagttcaccgtcggcgtcccgaatgccggccgcaatcagagcgagacccaagaactggtgggcttcttcgtcagcagccagatttaccgcgcccaactcaccgacgacctgaccaccgctgcgttcctccaggccctgcgccagcaatcgcgggcggccatggaacacgccgactacccgattgaactgatcatcgagcgcttgcaactgcaacgcagcagccaggccaacccgctgttccagagcctgttcaactggcgcgtgaaccagaaccaacccactgcgctgaaactgggcgagctgagcctcgagttcctgccggtggcgcaacaagaggccaagttcgatctgtcgatggacgtggactactcgccgcagcacatcactgcaaacattgagtacagcgcagcgctgttcaacccggcgaccatcgagcgcctgggcgcgcattggctgcgtttgctgcaaagccttattgaagcgccgcagcagcggctgggcgagctggccatgctggatcctgctgaacagcggcggatcacccacgaatggaacaacactgcgaccgcttacccgctggaccacagcgttcagcagttgatcgaagcccaggttgccgccacgcccgaggctccggcgctggtgtttgccgatcaacaactgaactatcgccagctcaaccgccgcgccaaccagctcgcccaccaattgatcgagctgggcatcggcccggactcgctggtgggcatcgccaccgaacgcagtgtggaaatggtcgtcggcctgctggccgtgctcaaggcgggtggtgcctacgtgccgctggacccggagtatccgcaggaccgtctcagctacatgatcgaggacagcggcattggcctgctgctgacccagcagcatttgctcgcatcgctgccgatccccgctgcgttgccggttttggccgttgatcaactggacctcagccgccatgccgacaccaaccccaacgtggccgtggacggcgaacacctcgcctacgtcatctacacctccggctccaccggcaagcccaaaggcgcgggcaaccggcattcggccctgaccaatcgcctgtgctggatgcagcaggcatacggtttgacggcccgtgacaccgtgctgcaaaaaaccccgttcagcttcgacgtgtcggtgtgggagttcttctggccactgatgaccggcgcccgcctcgccgtggccggccccggtgaccatcgcgacccggccacgctggtgagcctgattcagcgctaccaagtcagcaccctgcacttcgtgccgtcgatgctgcaggtgtttctgctcgacgaaaacgtcgcccattgcaccagcctcacccgcatcgtatgcagcggcgaagccctgcccgtggacgcgcaacaacaggtcttcgccaagctgccgaacgccggcctgttcaacctttacggccccaccgaagccgccatcgacgtgacccactggacctgccgcgaagaaggcaaggccagcgtgccaatcggccagccgattgccaacctcaccacctacatcctcgacaccgagctgcaaccggtgccagccggtgtgatcggcgagctgtacctgggcggcgcaggcctggcccggggttaccaccgccgcccggccctgaccgccgagcgcttcatgaccagcccgttcggtgacggccagcgcctgtaccgcaccggcgacctggccagctatcgccccgacggcgtgatcgaataccgtgggcgcatcgaccaccaggtgaaaatccgtggtctgcgcatcgagctgggggaaatcgaaacccgcctgatggaactggactgcgtgcgcgaagccgtggtcatcgctgccgacggccaactggtcgcgtatgccgtgccgaccgaggcccgcgaagccgatgagctgcgcagcgaaatcaagcggcgcctgggcgagcacttgcccgactacatggtgccggcgcagttgatcttccttgatcagttgccgctgagccccaacggcaagctggaccgcaaggccttgccaaaaccggatgccagcctgctgcaaaaaacctacgtggcgccgcagaccccgctggaacagcagatcgcggccatctggcaagacgtgctcaagtgcgacaccgtcggcttgcacgatgactttttcgagttgggtggtcattcattgctggccacccaggtcgtgtcccgggtgcgtcacagcctgaacagcgatgtgccgctgcgcagcctgttcgagtgcagcaccttgcaggcatttgtcgccaccctggcgcaggaaccggtacgtcacgagccgccgttggtgcgcgccgggcgcgatcagccgctgcgtctgtcctacgcccaggagcgccagtggttcctatggcaactggacccgcacagcacggcctaccacatcccggcggccctgcgcctgcggggtcacctggatacccaggcgttgcaacagagttttgaccggttgatctgccgtcacgaaagcctgcgcacctcgttcactcaagacggcgaacgcaccgtgcagcggattgccgagcccaccgggttgaccctcacggtcgagtcacggcccggggcagatacagcaacgatccaggcgtgtgtcgaacacgaaatccagcagctgttcgacttgcagcacggcccgttactgcgggtcaaactgctgaaactggcggaagacgaccacgtgttgatcatcacccagcaccatatcgtctccgacggctggtcgatcaacgtgatgatccgcgagctgatctcgctgtacgcaagtttcagccagcaacaggccaacagcctgccagagctgcccatccagtacgccgactatggcgtgtggcaacgccggtggatggaagccggggagcgcgagcgccagctggcctactggactgcgcagctgggtggtgagcagaccgttctggaactgcccgctgaccacgcccggccgtccgagcaaagctaccggggtgcccagttggacctggcactgggcagtgaactgaatcgagcactcaagcagctcgcccaacagcaaggcgtgaccctgttcatgctgttgctggcctcgttccagaccctgctgcatcgctacagcgggcaaaccgatattcgtgtcggcgtacccatcgccaaccgcaaccgcatggaaaccgaagggctgatcggctttttcgtcaacacccaggtgctgcgcacagaggtcaacggccaggcgcggtttgtcgatgtgctgcaacaggtcaaaaggcatgccctgcaggcccaggcccaccaggacttgccattcgaacaactggtggaagcgctgcaaccggagcgcagcctgagccatagcccgttgtttcaggtgatgtacaaccatgccagcgtgcagccgcaaaacagcgtgaccctccccggcctgagcctggaagtgctggaaggcacgctgccgagcacccagttcgacctttcgctggacaccagcgagtccgccgacgacctgctcgcaaccctcacgtatgccatcgatctgtttgaggccccgaccatccagcgcctggccgcgcattggcagaacctgctgcaggccatcgtgcacaacccgcaacaacgcctgggtgaactggacatgcttggccgggacgagcggcatctgatgttgcatgcctggagcagcgccacgcttgattaccccagcgagcagcgagtccatcagctgtttgaagcgcaggtggcgaagcaaccttctgccccggcgctgttcttcgaaacgcatcaattgagctacgccgaactcaacgcccgggccaaccgcctggcccgtcatctggtcagcctgggcgttggccccgacgtgctggtggggattgccgtggagcgcggcctggacatgatcatcggcctgctggcggtgctcaaggccggtggcgcctacgtgccgctggacccggagtacccgcaggatcgtctgctgtgcatgatcgaagacagcggcacgcagctgatcctgacccagagccacttgcttgaacgcctgccgattccggcgtatgtcgaaccggtatgcctggacctgaaccaggcctgggccgaactggacgacagcaacctggccaaccgcacccacgccggtaacctggcgtatgtcatgttcacctcgggctccaccggccggccgaaaggcgtgggcatcaaccagctttcgctgacgcgccacgcctacgtgtcgctggaatttttcaacctcaatggcgacgaccgcatcctgcagttttccaccttcaacttcgacggtttcgtcgagcagttgtacccggcgcttatctgcggcgcctcggtggtattgcgcggtaccgagatctgggacaccgaaaccttctaccgtgaactgatcaaacaccagatcagtgtggtcgatctgaccaccgcctattggaacctgctggccaaggactttgccgctgccggcccgcgtgattacgggcacctcaagcaagtccacgccggtggtgaggccatgccgccggaaggcctcgccgcatgggcccaggcgggccttggccaggtcaaattgctcaacacctacggtcctaccgaggcgacggtgacggtcacggcccttgactgcacggactatgtgacaggcgcctgcccgacgcccctgaccatgcccatcggcaaggtcctggccgggcgcagcatttacctgctggacgacagcggcgccccggcgccggttggggtggtgggtgaattaatgattggcggtgagttgttggcccgtggctatttcaatcgcccggacctgaccgccgaacgcttcatgcccgacccgttcagccagaccggcgggcggctgtaccgtaccggcgacctggcgcggtataacgccgacggggtgatcgagtacgttggccggatcgaccaccaggtgaagattcgcggtttccgcattgagctgggtgaaattgaagcgcggctgctggagcaggacgtggtgcgtgacgccattgtcctcgcgcaaccagcggccggtggcctgcaactggttgggtatgtagtgccccacagcacggcgttgcccgaggctgaattacgccagtcgatcaagaccgccctggccgccgtgctaccggactacatggtgcccggcttcctgatattccttgatgggctgcctttgagcccgaacggcaaactggaccgcaaggccctgccgaagcccgatgccagccaacagcaaaacagctatgtggcgccgcaaacggccctgcaaatccaggtcgccgggatctggcaaagcgtgctcaaccttgagcaagtcggcctcaccgatgactttttcgcactgggtgggcattcgttgctggcgacccagatcatctccagggtgcgtcaggccctgaaccttgacgtcgccttgcgcagcctgtttgaacgcagcgtgctcggggagtttgtcgccggcctgaatggccctgcccgccagcacgaacggccactgatacctgtcgagcgcaaccacccattgccgctgtcctacgcccaggaacgccaatggttcctctggcaactggacccgcacagcgccgcctaccacctgccggctgccctgcgcctcaaggggccgctggatgtggcagcgctggagcacgccttcaaccaactgatctcccgtcacgaagtgctgcgcaccaccttcgtggtcgacagcgaacagccccgacaagtcatcgccgatcaggcgccgctgaccctcgtggtcgaaacactcaacggcacgccggacgacgccacgctcaaggccttcgtggagcacgaaacccggcaactgttcgacctgcaacagggcccgctgttgcgcgtgcggctgctgcgcctggcggacgatgagcatgtgctggtcatcacccagcaccacatcgtgtccgatggctggtcggtgcacttgatggttgaagaactgatcgccctgtacaccgccgccgaggccgggcagcctcacgcgctggcaccgctgccgatccagtacgccgactacgccgcctggcaacggcaatggatgcaggccggtgaacgtgaacgccaactggcctactggacggcacaattggccggtgaaaacagcgtgctggagttacccaccgatcgcccgcgcccggccgaacaaagctaccggggtgcgcacctggccctcactttggcgccaagcgtgggtgacgcggtgcagcaggtcgcccagcgcctcggcgtcacgccgttcatgctgttgctggcgtcattccagacgttgctgcaccgctacagtggccagaacgacatccgcgtcggcgtgccgattgccaaccgcaaccgcgtggaaaccgagggtttgatcggcttcttcgtcaacacccaggtcatgaaggccgagttcaacgcgaacctgagcggtgaagcactgctgcaacaggtcaagcggcatgcactggacgcgcaggcccatcaggacttgccattcgaacaattggtagaggcgctgcaaccagagcgcagcctcagccacaacccactgttccaggtgatgttcaaccaccagagcgccgacaccgagcgccggccactgccgtcggcgctacaggtcgaaggcctggactgggaaggcagcaccgcgcaatttgacctgacgctgagcaccagcgagtcggctgatggcctgagtgcaaccctgacctacgccaccgacctgttcaacgcggccaccgtcgagcgcctcgggcagcattggcaacagctgttgcacggcctgatagcagacccccagcagcggattgccgacctgccgatgctggaccgcgccgagcaacagcagattgtcagcgggtggaataacacccgaaccgactatccactcgaccgcagcgtgcaacagttgatcgaggcgcaagtggccgccacgccagaggctccggcgctggtctttggcgatcaacagctgagctatcagcaactcaaccaccgcgccaaccagctcgcccaccaattgatcgagctgggcgtcggcccggactcgctggtgggcattgccaccgaacgcagcgtggaaatggtcgtcggcctgctggccgtgctcaaggcgggcggcgcttacgtaccgctggaccccgaatacccgcaggaccgtctcagctacatgatcgaggacagcggcatcggcctgctgctgacccagcagcacttgctcgcgtcgttgccaatccccgctgcgttgccggttttggcactcgaccaactggacgtcagccaccacgccggcaccaaccccaacgtggccgtggacggcgaacacctcgcctacgtcatctacacctccggctccaccggcaagcccaagggcgcgggcaaccggcattcggccctgaccaatcgcctgtgctggatgcagcaggcatacggtttgacggcccgtgacaccgtgctgcaaaaaaccccgttcagcttcgacgtgtcggtgtgggagttcttctggccgctgatgaccggcgcccgcctcgccgtggccggccccggtgaccatcgcgatccggccacgctggtgagcctgattcagcgctaccaagtcagcaccctgcacttcgtaccgtcgatgctgcaggtgtttttgctcgacgaaaacgtcgcccagtgcacccgcctcacgcgcatcgtgtgcagcggcgaagccttgcccgtggacgcgcaacagcaggtcttcgccaagctgccgaacgccggcctgttcaacctttacggccccaccgaagccgccatcgacgtgacccactggacctgccgcgaagaaggcaaagccagcgtgccgatcggtcaacccatcgccaacctcaccacctacatcctcgatgccgaactgcagccggtgccggcaggcgtaattggcgagctgtacctgggcggcgcaggcctggcccgaggttaccaccgccgcccggccctgaccgccgagcgcttcatgaccagcccgttcggtgacggccagcgcctgtaccgcaccggcgacctggccagctatcgcgccgacggcgtgatcgaataccgtgggcgcatcgaccaccaggtgaaaatccgtggcctgcgcatcgaactgggggaaatcgaaacccgcctgatggaactggactgcgtgcgcgaagccgtggtcatcgctgccgacggccaactggtcgcgtatgccgtgccgaccgaggcccgcgaagccgatgagctgcgcagcgaaatcaagagaagcctgggcgagcacctgcccgactacatggtgccggcgcagttgatcttccttgatcagttgccgctgagccccaacggcaagctggaccgcaaggccctgccaaaaccggatgccagcctgctgcaaaaaacctacgtggcgccgcagaccccgctggaacagcagatcgcggccatctggcaagacgtgctgaaacgggagaacgtcggcctgaccgataacttcttcgaactgggcggtgattccatcatctccattcaagtggtcagccgtgcccgccagcaaggcatcgcctttacgcccaaggaactgttccagcaccagaccgtgcaaggcctggcgggcgtggcccgcagcggcgcgagcgccccggtgatcgagcgcggccccgccaccggcaccctgccattgctgccgattcatcaggtgttttttcaaacgccgatgcccgagcgtcaccactggaaccagtcggtgctgctcaaagccttgcaaccgctgcaagcagaagccctgcaacgggcgctgtacgccgtgatcgagcatcatgacgccctgcgcttgagcttcgaacagcaggccgaaggctggcgcgcagattaccggccaatggccgactggcaactgcaacaggtcgacgccagcgccgagcaactgtcagacctgtgcgaccaagcccaggccagcctcgacctgcaacaaggcccgctgatgcgcgccctgttgatccacctggccgacggtacccagcggctattgctggtgatccaccacctggccgtggatggggtgtcctggcggattctgtttgaagacctgcaaaacgcctatcaacaggccgtcaaccagcaggccgtgcagttgccggcccgcaccagttcgctcaaggcctgggccgagcgcctgcaacagcgcgcgcaaagccaggcgtcgaacgaggaactgaacgactggctggcgcgactcgacagcaacgccagcgacctgccctgcgaacggcctcaaggcagcctggacaaccgccacagccacacactgcacacgcacctcgacgcgcaacagacgcggcaactgctgcaacaggcccccaaggcctaccgcacgcagatcaacgacctgctgctgaccgccctggcgcgcgtcatcagccgctggaccggcaacgggcattgcctgatcgaactggaaggccatggccgtgaagacctgttcgaggacatcgacctgacccgcaccgtgggttggttcaccagcctgttcccggtcaagctggtgccggccgcaggcctcggcgattcgatcaaacagatcaaggaacaactgcgtgccatccccgacaaaggcctgggctacggcgccctgcgctacctgggcacgccgcaggcacgggccagcctcgccgccctgccgcccccacgcatcaccttcaactacctcggccagttcgacggcagtttcgatgccgcacaaggcgcgctgctggcacccgccgccgaaggcagtggccgtgagcaggccctcggtgcaccgctgggtaactggctgagcctcaatggccaagtgtatggcgatgagctgaccctgggctggcaattcagccgcgagatgttcgacgaggcgaccattgcgggtctcgcggatgacctcaaacgcgaactgctggcactgatcgagcattgctgcgacaccgccaacgtcggcgtgacgccttccgacttcccgctcgcgcacatcaaccaggcgcaactggaccggttgccggtgccggtggcgcaggtcgaagacctttacccgttgtcggcgatgcaacagggcatgctgttccacaccctggaagcaccggaaagcgcgctgtatgtgaaccagatggccgtctcggtcgcgggcctggacgttgcacgtttcactgcggcctggaatgccgtgatcgagcgccatgaaatcctgcgcaccggcttctgggccgacaaccagttggccgaaccgctgcaagtggtgtaccgcagcgcgagcctgccggtacaagtcctcgactggcaggggcgtgaggtcaccacgcaagacctggaaaccctggcgagccaggagtgtgcccgggggttcgaactgctgcgcgcgcccctcacacgcctgacactggtgcaactcgacccgcagacccattacctgatctggaccagccaccatatcctgatggacggctggtccaattcgcggttgctgggtgaagtcttcgcgatctacaacggccaggctgcaccggccaagcgcgggcattaccgcgactacatccgctggctgcaagagcagtcccagacgctgctggagcagttctggaagaccaggctgcagggtttgaacggcacctcgtcgctggccaacagcctgtcgcccaaaccgtcgatggaactgcaaggccacgcggcgctgtacctcaattgggatgcggtgcaaacccgccacttgcgcgaacaggcccagcgcctgcgcgtcacgccgaacacattgatccaggccacctggctgctgctgttgcagcgctacaccggccaggacaccgtgtgcttcggcgccacggtggccggtcgcccggccagcctgccgggctccgaggacatgctcgggctgtttatcaacaccttgccgatcatccagaccccgcagccgcagatgcccgtcacccagtggctgcaagccttgcaagcctacaacctggaagtgcgcgaccacgagcatgcctccctggcagacgtgcaacgctggtcgggccagggtggccagccactgttcgacagcattctggtgtttgaaaactacccggtggacgaacgcctgcaagaagccgggagaggccacttgaacttcggcgacgtcagcagccgcgatgtcaccaacttcgccatggacctggccatcgacctgggcgacaccctgaagatcgagttcctgtacctgcgcaaccgcttcactgaagcggcgacggcgcaaatccgccgcagctttgaaaccctgctgctggagctgctgaacaacgcccaggccaatgtcggcagcctgaacatgctcgcagacgccgaacagcagtcgctgctgcaacgtaacgtgctttgccctgtgaccgcgccgcgcgctcacctggcgcaggtgatccgccaacatgcgctggaacgcccggacgcagtggcggtggtgtgcgacggtatcgaattgagctacgccgaactggatgcccgagccaatcgcctggcccattacctgatggcccagggcatcggcgcggagaggttcgtgggggtcgcgcttgaacggtcggtggacgttatcgtcgcgttctacgcggtgatgaaaaccggcgccgcctacgtgccgctggacattgattacccgcaagaccgcgtgcagtggatcgtcgaagactcggccatgagcgtgctgatcagccagcacgcacttcgttcacgctttgagggcgtcggcggggcaaccttgatcgaactggaccgcctgccgctgtcggattggccggcgacgtgcccgcaacccgaggtgcacgacgacaacctggcctacctgatctacacctccggctccaccggcaagcccaagggcgtggccgtggcgcatgggcaaatccgcatgcattgccaggcgattgccgagcgttacgagatggacagcagcacccgtgaattgctcttcatgtcgttcgcctttgatggcgcccaggagcgctggctgtcgaccctgcaaagcggcgcttgcctggtggtgcgcggcaatcagctgtggacgccggaagaaacctggcaggcgctgcacgcccaccgcatcagcatcgcctgtttcccgccggcgtatctgcaacagctggccgagtacggcgacagccaaaacgaggcaccaccgcccgtacgcatctactgctttggcggggatgcggtggccgaggccaactttgagttggtcaagcgcgtgctccaaccgcagttcctgaccaatggctacggccccaccgaaaccgtggtcacgccgctgctgtggaaagtcagtgccgagcagcgttgtgaggcggtgtatgcgccgatcggcactcgcatcggcgaacgcaccctgtatgtgctggacgaacacctcaacccggtaccggatggcgtggcaggcgagctgtatatcggtggcgaaggcgttgcccggggttatcaccagcgccccggcctgagcgccgagcggtttgtggtcgacccgttcgcggcaaacggcacgcgcctgtatcgcaccggcgacctggtgcgccaacgcccggatggcatcattgactacctcggccgcctggacaatcaggtgaaaattcgtggcttccgcatcgaactgggggaaattgaatcacgcttgcgtgacctcagcgacgtgcaggacgccgtggtggtcgcccgcgatatcgcgggcggcaaacaactgatcggttacgtggtggccgatgcctcggccggcctgggagaacgcttgcgcagcgctttgcaggtggaactgcccgattacatggtgcccgcgcaaatcctcgtgctgcaggccttcccgctcaaccccaacggcaagctcgaccgcctggccctgcccgacccggacttcaagggccgcgctttcgtagcaccgcgcaacccgctggaagcccagttggcggcgatctggcaggacgtactggaactggacagcgtgggcgtcaccgacaacttcttcgagttgggcggcgactcgctgcgcattctcaaggtgctgtccaaagtgcgcagcacgcccgggatcggtatcgagctcaagctgcgggacatgatcggcaagccgaccatcgccgagctgtccggctttaccgacgacgaggccagccttaatccgttgctgttgctcaacagtgaaacagcgcacaacccgccgctgttctgcctgcatgccggttttggcacggtgttcgactacgagcccctggcgcgccgcctggacgggcagcgcagtgtctacggcctgcaatgccggatgttgctggaccgccagtgggaggatgagtccctggaagccatggccattgattacagccagtacatccgccaacaacaggccagcggcccgtatcacctgatgggctggtcactgggcggcaccctcgcggtgctggtggcccaggaactggaaagccagggccagcaggtggaattcctcggtctggtcgacagttttatcccgacgggcgaggacgttgtaagcgttgactggagcgaagacttgcgcggcttcctggcggtgctgttcggcgtgccgagcgagagtctgcctgcccttgaggtcacagcgaccaccggcagcgagcggcttgaacaactgatcgcgcacgtccaggccggtgccgccgcgcaatcggtgtatgccgggatcagcgccgaggagttggcccacaccttccaggtggcgatgaaactcaaggtgctgtcggcgcgcctcaacggtttgccggccacccgggcgcaggctgaatgctggtgggccaaggcgcttgccggccagcccgcctcgaacctgggcagcgcgcgcagcaatgaacagatcgcggccggccactacgacatcctcaaccacccggccctgctgcacgggttgttacaacacttggcgctgcaacccgtcgtcagctgaaaccgccgccgcccctgatggtcaggggcggcgctccaccctatatcgcaaggaacctgcaatgcccctggaccctgatctcgaaggctttctggaattggcacagatgggccgcctgaccggcaaaagccagcccatgcacgcactgagtgttgaacaggcacggcgcgaattcgaacagacgtcggccattctcgaccccagcccaccgggttcggtggcggtgaccgcgttgaccgtcacggcacgcgatggccatgcactgcccgcccgcctttaccgcacaccgggcaccgcaccgttgcccgtgattgtgtatttccacggtggcggttatgtggtgggcagcctcgactcccacgactccatctgccgccggctcgcggccagcgggagatacgcggtcttcgcgccctcctatcgcctggcaccggaggccatctttcccgcagcagtcaacgacagcctcgacgccgccaactggctggccgagcacgccggtaacctgcaattggatcacgatcagatgattctggcgggcgacagtgtgggggccacgctggcaaccgtgttggcgatcaccgccgtcaaggcaccgcaaactctggcgttcaaaccccgcgcgcagttgctgttctacccggtcaccgatacctcgcggcaacgtgattcccaccgccaatacgccgaggattatttgctggaaaccgccacgctggactggttctaccaccactattgcccccagccccaacagcgcctcgactggcgggtttcaccgctgctggccgaagggctgacggcactcgcgccggcctatatcagcctggccgagtacgacccactgtttgacgaagggcaggcttacgcccagcgactggcggcgagtggcacggcggtgaacctgcgcgtggagtcagggctgactcacgactttttgcgcatgaacgggatcagcggtgccattgccggcatttatgaaggggtgttgaggtggctggaagaacagcgccaatcagcggcatttggctaacgcaagaaagtaaaagccgaacaaggtcactgtggtgagcccgcttgctgtggtgagcgggcttgccccctcaccacaaatcatcggttacagactcgcctgcgcctggcgggctttttccatcagcgcggccttctcctgcgggctcattgcatccagccgcaagcgcgcctgggcaatcttctccaactgccccgcgacaccttcacgctcgcgcagcacctctgccagcgctgcaacgctggggtggtcaaacaccacaccggggtggatctcgcactgcagcaacttgcgaatacccgccaccagcttgatcaccaacagggaatgcccgccggcagcaaagaagtcctcgtcgatgctcaaccgctccaggccgatcaactgcgccatgcgcgtggacaacaacgtttccagcgcatcccgtggcgccacatacgccgcccgcgaaaccaccggctgagcctgctgcaacgctttgcggtcaaccttgccgttgggcaggcgcggcatgcgttcaaggctaaggatctggcggggcaccatggccgccggcaggcgttgcgccagttgggctttcaacccggccacgacctcctcgcccgccgaggcccgcacgaccacaaacgcttgcggctcctcctggaccagcacgaccaccgcctcactcacttcaggcaattgcagcagttgcgcttcgatctcgcccagctcaacccggaaaccccgcaccttgacctgatgatcacgccggccatacagctgcacgccgccttcaacccggtaacgggccaggtcgcccgtgcggtaaagacgctcgccgcccacccacgggctatggataaacgcttcactgtcggcctcggcgttcaggtagccacggcacagctgttggccaccgatgaacagctcgccgagctcgcccgtcgccagcaactgtgcgtcggcacccagtacaaacacctgattaccgggcaacacttgggtcaacggcacgccatgggccacgtcttcacccggcgccaagggatgtaccatgacccccacggtcgcttcggtcgggccgtagtggttgaacacccggcaatcgggcagcacctgacgaatgcgctgcaccaagcttgcgccgatggcttcaccgcccagcaccagtgtgccgggcaacacggcgctctcggcttccagcaacgccgccaggtgcgagggcacgatcttcaggcaatcgatagcgtgctcacgcacaaacccggcgaagccttgagggtcttgcaaggtggcatcgtcggcgatatgcaaggttgcgccgttgtacagcgcgccaaacaaggcagtgttgcccaggtctgccgctaccgtggagctgaacgcaaaatggcggcacgcgcccaggcccaattgctggctgctgctcgcggtgtagttgagtaacgcaccctgctcgatcaccacgcccttgggctgcccggtggagccggaggtgaacagcacgtacgcaacgtccgtcgcctgcggggaaaccggcggtaccactggcccgtcgaacgtcgacgcagccagattgagcacgttgaacgaagccagcgggtcgccctggcctggcgtgtgtgcggtcagcatcaagcgtgcatcggcctgccgggcgatttgcgcctggcgcgccgccggccattgcgggtccagcggcacataagccgcgcccgcgcgccaggtggcgagaatggccaccaccagctccagcgagcgcggcaatgccaggccgacaaccgaccccgcccccacgccctggcgcagcaactcggcactcacgtgtgcggcgcgggcctccagtgcagcgtagctgagcgactcacccgcagcgaccaacgccacggcgtccggtgtctggcgggcccacgcggcgatccgttgcggcaacagcggcgcgttcaacgcttgcgccgggggattgagtgccagtagccggcttttttcgtcggcgtccagcaggttcaggcgcgcgatggtttcatccggtttgtcggcaatgctgtgcagcaattgccggtattggcccaacagggtttcgatggcttgcggggtgtagtgtgccgggttgaagtccagtgatacgccttgaggttcgccggccacagtgacgtccagctgcagtgccaattcgaattccggcgtgcgggccggcaggtcgctgccggtccataccaaacctgctgctgcctgcggcgccgtcacctgccggcggccaaagccgatggcgggtttggcctgttgggggaacgacaacggtgccaggtattcctgccaggtgcggtgctgatccagctgcgcggccagggtgtttaacaggtcgcggaatgggctggccgggtcgatacgcagcgccaggggcagggttttttcgaacaggcccaggctgttgctgaagaactcgtaatcctggcgggcatcgtggcgccagcccgcgaggaacgattcccggccactgatgcgcgccagcagtacccaccaggcggcttgcatcagcacctccagcggttgcccctgtgtgcgcaagcgcgccagcagggactgatccagcggtacgctcaaacgctgcgcgggcataacctcggtggacgccaggcgataaggcaaatccggcccggcaacctgcggttcggggccttgcaaatactgctgccagtaggccttggcggtgtcggcgtcttcgtcgaagatcacttcgccgcgccattccaggtactgggaaaactgccccggctcgtcctcggcataggcttgccgcccgtacgctgccagcaggtcttgctggatcagggccaacgtaccggcatcggccgcgtagcgcgccacgcccaccagcaactgccaatgctccgtttccaggcgctgcaacaacgcaccgatcagtggcaacggctgttgccgccattgctgctggcgtgcactcacttgttgcggcgacgccacgtcgagccattgggtcaagctcacggcttgcgcctgcgccacccgctggcgcaggccgtgatagccgctgaccggcgcaaattgcgcggccagtgcttcgtggcgcagcaccaggctgtccagcgcgagctgcaagcgcagcgggtccagctcgccacgaatgtccagtttcaggcagtgggccaggtcgccccagcgtgcgccctgctcgcgtgcatccagatgctgttgttgctcggccagcaacgccagccccgcgtccacgcttccctgttgtgcagtactcatgctccggcctcttccttatcggtctcgcggtgcgccacgtgcagcgcactgcgttcaatcatttcgcccatcgccacgacaatcttgcgcggcccttcaaaggggtcgcgggcgtgggcagccagcatgttgtccagcaggatgacgtcacccttgtgccagtcaaaccgcacggcacaggcttcgtacagctcgcccaccagcgccatgacctcgtcttcaatcggtgagccgtcgccgtagtaaacgtgacggggcatgcgctgctcgccgaacagcgccagcaggtcttcgcgtacatccgggtccaggcagaagatgtggtgcagttgaacctggttgaaaaaggttttttccccggtcaccgggtgccggatgatcgccgggcacggggtgcggatctgcagttcatcgttgtccagccaggtccacgcgatgccggccgcccggcaacgtgcttcgacgtcggcacgcacctcggtcttgaaaaagtgctgccaggacacgtcaagtttgtcggcaaaggtgcgcacgtagagcaaccccttgtcttcgaaacgctggcgaatcgccggtggcaacttcaggtacatctgtcggcagtccacgaccggggtggcgccgcccaccggcgagggctgctcgcagaagaacagttgcttgcgcggccagcggtcctgatgggagctttcgttgtggaacaggatcattttcttttcggggtacggcgtggaacggtaagtgtttttgccgccttcttttttcggcaagtcaccgtattggccatacaggcctggctgcacggcctcggcaaaggcttcgaagtcgtggatgtcgcgcagggcaaaaccgcggaacagaatccccgcatggcgcgccagcttttcttcaacgagcgcgcggttatctttgatccaggccaccaggtccagtcccggatccgtgggctccatcagcagtggaaaatcctgcccgggtaccagcagcgattcacgcatcaaggcgccggcgggcttgtcggtacggctttgatttttcttcaggaacttgcccagcttgtcggccttgatggctggcggtacaggcgccggagtgggttccagggtgtgggtaggcatggtgatatcccctaattgaatgttcggatcacacacaatctgttcaagcattcccgtccaggcgttaacgaatgactcgatgcgttgttgttcaaacaggtcgctggcgtactgccaggtaccgtgcaggccgcctgcatcctcgtcgaggaacagggccatatcgaatttggaataaccactgcggcctggcagcacctcaacctcgatcccgtccattcggccgctctgcaccggcaggttgttcatcacgaacagcacctgtaccagcgggttgaacccacgttggcgcggacgtgatgcggcttccacgatcatgtcgaacggcaggtcctgatggtcaaaggcgtccagcgcggtaccttgggtggtggcgaggaaagcactgaacggctgctgcgcggcgaaggtcgagcgcagcggcaagatgttgacgaagaagccgatcagcccctccagctcgggctgttggcgcccggcaacgtcggcgccgaccagcacgtcatcgctgccgctgaggcggtgcagcatgacctggaacgcggccagcatcgtgctgtacagggtgacgccggcacgcgccgacaaggccttgagcccttcatgcaacgcagacggcagcgtgaaactcaggtcccggcccgcgtggctgggcacttgtggccgaggccgatcggtgggcaattgcaacacgccgctgtgtccggccaacgcctgttcccagtaacgagcttgcgccgtcagcacgccagcttgttgaagctgctgctgccagtgcgcgtaatcggaatactggatcggcaaggcgggcagcggctcattcacccccgtcgtcgcccggccatagagactcaccagctcgttgaccagcaccgccatcgaccagccatcggagatgatgtggtgcatcgaatacagcaagacgtgttcggtaggccccagcttgagcacgtgcccgcgcagcaacggcgcctgcaacaggctgatggcttggcgggtattggcttcaacggcatcggcgacgcgaagctgctgctcggcggggtccagggacgacaggtccagcagcggcaaatccacctcgacgtgcgcggcgatcacggcgagcggatcaccctcctcgtccgtaatgtaggcggtgcgcaaggtttcgtggcgggcaaccacttgcgccaggctgctcaccagccgtggcaccgacagctcgccgcgcaggcgcacggccagcggcatgccataggcgccactggcctgggaaagctgctccactacccataggcggcgctgcaccagcgacagtgccgcgctgttttttttaccttgcgctaccagtggaatgtgggtcgccgagccgccctgcccgacccgggctgccagcaccgccacgaagtccgccagacggggcgcaccgaacaggtcacgcaaggtcagctcgcaggccagcaccggtctcaagcgcgcgaccacttgcgtcgccagcaacgagtgcccgcccagctcgaaaaagtgatcgtccagcccgacccgatccagctccaatacggtttgccacacctcggcgacctggatttccagggccgtttgcggcgccacatagtcgctttgccgtgcactgatatccggttgtggcagggccttacggtccagcttgccgttgttgttcaacggcagcgcttcgagcattaccaggtgagcgggcaccatataagccggcaaggactcgcccaaccgcgctttcaaaacggacgcctccaggggattcgcctgtggcaccacatacgcgaccagttgcgcgccggtcggcccctgctgcgcgatcacggccgcctcgcgcacctcgggcatggcttgcaggcacgcttcgatttcacccatttcgatccggaacccgcggatcttcacttgatgatcaatacgccccacgtattccagcgccgcgttttcgttgtagcgcgccaggtcgccgctgcggtagagccgtgcccccggcacgccggaaaacggatccggcaggaagcgttcagccgtcagcgccgggcggtcgaaatagccttgggccagaccggccgaggccccaatgcacagctcaccgacgccgcagttcgccaagccttcaaaactgctgtccagcacgtacagcgcgcgcccttcgatggcccgcccgatgggtatgccataggcatcattggcatccgccagttggcagtcatgcacgctggacaccacggtggcttcggtcgggccataggtgttgagcaaacgcacgccgcccaaaccggccgcgtgccaggcgcgcacgccttccacggccatggcttcgccaccgacatgcacctggcgcagctggcccagcgtgcggccatgggcggcacactccttggccagcaggtaccaataggccgcaggcaagtcggccagggtcacgccttgctcgacgatttcacgggccagcagcccggcgtcccacacctcgtcaccgcgcatgatcagtgccgcgccgacgcacagcggtgggtagcactgctcgacaaacccgtcgaagctgaacgtcgcaaattgcagcacgcggtcggtgggtgtcagcgcactgtagtgcgccgccgtgtcacagaactggtcgagcgcgccgtggtcgatggccacgcctttgggttggccggtggaaccggaggtgtagatcacataggccaggtcggcgggggttgcgtgattcggcggattggtctccgggtagcccgccagttcttcgccgtgtgcgctgaagtccacacgattcaggcctgggggcaatggcaggtccgcgagcaacccggtttcgctgagcagcaggctcagacggctgtccgtcagcatgtaaccgaggcgctcggccgggtaggcagggtccagcggcacataggcagcaccgcttttaagcacggccagcaggctgacgatcaactgcgacccacgccgcgaagccaggcccacgcgctggcccggacccacgcccagtgccagcaggcggtgcgccaggcggttggcgcgttgattgagctgccgataagtcaggcgctcatcgcccgcctgcaccgccagcgcatcgggcgtggcgtcggccctggcggcgatgcgctcgtgcacgcgcacttgccgctcggctgcgcgaggggattggctgatcgcaagcaagctggcttgcgcgctttcgtcgagcaagcgcaggttgccgagcggcacacgggcatccgccaccagttgcgccagtaggtgttgcaggttggcgctcaaatgggcgacctgttgcgcgctgaagcgggtgcagtcgtagctgaactccaggcgcaggctgccacccaactcgatgcccagggtcagcgggtagtgagtgcgctcgtggttgtgcaacctgccgaaggtcagcccggcgggggcgccctgtttcaatgcctcggcgaccgggaagttttcgaacaccagcaaggtgtcgaacagcgctgtgccttgctggccggcccagctctggatgtcgtaaagcggcgtgtgttcatggtcgcgcaggcgcaggttcagggcttgcagctcaccgagccattcggcggccggccgggccggcgaggccgcgctgatgatcggcaaggtgttgataaacagccccagttgctgctcgattcccggcagcggcgccgaacgcccggcgacggtggcgccgaacgccacgcaagcctggccggtgtagcgttgcagcaagagggcccaggcgccttgcagcatggtgttaagggtaactttgtggtggcgggcgcaatcaccgaggacacgggtgaacgcgctgtccagtgtcacctgatagtcggccatgccggcaccgcccaccggcgcgcgcagcgcttcggccagcaaggtaggcgcgtgcaacggcgccagctcggctttccagaacgcttcgccgcaggcttgctgttgcagccaacccaggtaatcgcggaactgccccaagggcgcgggcaacgtttggcctgcgtagtgggagatcacttcgccgagcagttgggcattgctccagccgtccatcaagatgtgatggctggtaaagatcaggtgccaggccgctcccgcaccgcgtaccagcatcaagcgaaacagcggtgcgctgctcagctcaaacccgcgctcacgctcggcatcggccagggcgtcgaaatcggcattcgggtcttcaatcacctgcagttgcaggtccacctgacggtggatgacctgatgagcgctgtccaggccctgccagtggaagctgctgcgcaggatgtcatgccggtcgagcgcggcctgccaggcacgcccgaaggccagcagatctaggccttcgatgtccaggcgcaactggttgatgtaagcctgggctacgggttcgtacagggtgtggaacagcatgccctgctgcatgggcgacagcgggtaaaggtcggcgatggccgggccggccaccggcaaacggtccaattgctgttggctcaggcgtgccagcgggaagtccgacggcgtggcctgcccggcaggcgtgtcgcagcaatggcggatcaacgccttgagttcaaccgtgtattcatccgccaggcgctggagtgtcgacgcttggaacatctcgcggctgaacccccactgcaacgccagctcgccgccatacacctgcccttccaccgtcagccagttggccaaaggcgcttcggcgtcctgagcctggccgctgccttgagtggcggggacaaacagtgccgagtcattgaactggcgatcaaactggccgaggtagttgaaggtgatacgcggcgcagccaggtcttcaagggtttcacgcacttcaggcgcagccaggtagcgcaacaggccatagcccaggcccttgtcgggtatggcacgcagctgttccttgaccgacttgatcgcgctcgacaattcgccgtccgcctgcaggcgtactgggaacaagctggtgaaccagccgacggtgcgcgtcaggtcgacgtcgtggaacagctcttcacggccatggccttccagctggatcagcgccgcagcttgcccgctccagcggcagatcacacgcgccaaggcggtcagcagcaggtcgttgacctgcgtgcggtacgctgccggcgcgtcttgcagcaactggcgggtagaggccgcgtcgaggcgggtttcaattttgctgcccaagcggttttgcagcccgccttcagggttgtcgcacggcagctcggcgtcggcggtttgcgcctgccagtatggcagttgctcgctgagcgtcagcgcgcgggcttgcagctgcccggcccagtgctgataggcgctggtcttggccggcagcggcacctggcggcaagcctgctgcaagtcttccagcaggatgcgccacgacacaccgtcaaccaccaggtggtgcaccaccagcagcaagcgttgggtgccgtcagccatggcgaccagaaccgcgcgcaacaacgggccgtgcgccaggtcgaggctgcgctgggcttcgtcacacagtgcggccaacgcggtgtcgtcagtggcatcggactgccacaacacaggctcggtgaccggcgcgccatgggtttgctgccactcgcccgcccgctgcacaaagcgcaggcgcagggcgtcgtgatggttgatcacttgcatcagcgcggcttccagccgggccggttcgaggtgctcgcgcggggtcagcaacaaggactggttccagtggtgccgcgccgggatcgcctgggcaaaaaagctgtgctgtaccggcgtcaggatcacttcgccgctgaccgggccttggtcgatgacacgggcctgctcaaacgcggcgaccagcgccaggctgcggatgctctggtactggaacaggtcgcgcgggctgaggcgaatgcccgcctgacgcgcacggctgaccacctggatggagatgatcgagtcgccacccagctcaaaaaagttgtcttcaaggccaacctgttcgacgccaagcacatcgacccaaatcgccgccagggctttttgcaggtcgttttgcggcgcgacaaatgcctgttgcggtgccgcatccggcagtggcagggctttgcggtccaacttgccattggcggtgaccgggagcctgtccagggtgatcaggtgcgtcggcaccatgtattccggcaggctctggagcagccacgccttgagatccgcgggcgcctggctttcaaggaccaggtaggcaaccaactgcttgcccccctgtaccagcaccaccgcttcacgcacgctcgggtgctgcatcagccgcgtctcgatttcccccaactcgatgcgcaaaccgcgcagcttgacctgatggtcgaggcgccccaggtattcgatcacgccgtcggcacgctggcacacgcggtcaccggtgcggtacaggcgctcacccgcaatgaacgggctcggcacaaagcgctcggcagtcagtgccgcacggcggtggtagctgcgggccaagccggtgccgcccaggtagagttcgccggacacaccggccggtaccgggttaagttgggcgtccagcacgtaagtggcgaggttggcaatcgggcggccgatgggcacgctgtcggcgccttcgtcgacgcaggtccagtgggtcacgtcgattgcagcttcggtcggcccgtagagattgtacaaaccggcgtttggcaacttggcaaacacttgcaactgggcgtccagtggcagggcttcgccgctgcacacgatgcgcttaagccccgcacaggcgtgtacgcccggctcgtgaatgaacgcctgaagcatcgacggcacgaagtgcaaggtggtgatgccgtggcggccaatggtttcgatcaggcgggccggctcgcggtgctcgcccggggcggccaccacaaggcgtgcgccggtcatcaatggccagaaaaactcccataccgacacgtcgaagctgaacggggtcttctgcaacaccgcatcgctcggcgccagggcgtaagcctgctgcatccagcacaagcggttgaccagcgcgcgatggctgttgccggcgcctttgggtttgccggtggagccggaggtgtagatcacgtaagcgaggttgagtgcgtggacagcaaccgctggcgcttcagtgccgtagccgtcaagccaatcgtgcgaagcgtccagggcaatcacctggataccctcgccgggcaaggaagcctgcaggctttgctgggtcagcagcaactggatgccgctgtcttcgatcatgtaggcgaggcggtcctgggggtactccgggtccaaggggacgtaggcgccgccggccttgagaatggccaaaagaccgaccaccatttcgatcgagcgctcgacacagacacccaccaatacgtccgggccaacccccttttcgcgcaaggcgttggccaaccgattggcgcggatatcaagctgggcataggtcaacgtggttgagccgaacaccagcgctggcgcatccggcgtacgtcgaacctgctgctcgatcagttgctggagcgcgcagtgcgtcgggtacgcttgcgccgtctggttccagtcacgcaccagcacgcgctgttcatcggcatccagcatcggcaattcgccaacgcgccgctcaccgtcagccaccatggcgtgcaacaggctgatccagtgccgcgccatgcgctcgatggacggcgcgtcaaacaggtcgttcgcgtaggtcagtgcagcgtgcagggtgccggacttctcgtaggtgtccagggtcaggtcgaattgcgtggtgcggccttgccaagccaccagggccagttccaggccagacgccgtgctgaccgaggcgatgtctgccaccaccggctgatggttgtacatcacctggaacagcggcgtatggctgaggctgcgctcgattttcaaggcttctaccaggcgctcaaacggcaactcctgatgagcctgggcgcccagagcgtgttccttgatactttgcagcaactcggtgatgcgggtctgcccggtgagttcagtgcgcaggacctgggtgttgacgaagaagccgatcagcccctcgacttcaccgcgattacggttggcaatgggcacgccgatgcggatatcgccctgccccgtgtagcgatgcaacagcacgttgaacgcaccgagcagcagcatgaacaacgtgacattgtgtttttgcgcacagctgcgcagctgtgcagccaggtccgaatcaatcgcgaaattatgccgcgtgccctgatagctcggcatggccgggcgcgggtgatcggtcggcagttccagcaccggatgctcgtcgcccaggcgggcttgccaatagtccagctggcgcgcctgttcccccgcttccagccagcggcgctgccataaggcgtagtcgctgtactggatcggcagcgccggcagttgcggcgtgtcattgcgctcatgggcatcgtaaaaacggatgaactcgtcgatcagcacattcatcgaccagccatcggagacgatgtggtgcagcgtcagcagcaacacgtgctcgtgatgatcgagcttgagcaattgcacgcgcagcaacggcccgtgctccaggtcgaagggcagcagcgattgacgggtggcggccgcgctgacggcctgttcacgctcggcaggcaacagggtgctcaaatccagcgtctcgattgccagtgacggttcgacagcgacctgcaccaggcggtcgtcggcctgacgctggaacacggtgcgcaaagtttcatggcgcagcaccaggctggcgaacgcctgctccatcgcgccgaggttcagcgcccccttgagccgtaccgctcctggcaggttataggcgccgctggccgggtccagttgccagagaaaccacatgcgttgctgcgcgtaagacagtgcctggcgatcctcggcctccacccctgccggaatcggaaaccgggaaaaatccacaccttctttctgcaaggcttgcaggaacaattggcgtttttccaggggcagcccgataaaccggcgagcaagtttcaaggagtcttcagcattcatgtgttggagtccggagcaataggcaagtagcacaaaggcacgtcgtccctataaaacgaaccgggaaaggaaaaattagcgggggatgggaggcgaaaagctgggtgtcatcaagggttacatcaatctcaggaaaggcgtgcatgtacgcgctagcattgacgcacaccacttcttgcaactacatttagttacaggcaaggatcgccgtgtcaaaaaatgaaaagctgctcgccaaactgctcaacgagcacatggcatttacctggcctgagctcattacgctgttgcataggctcggctacaaacagattgaaggggctggaagccgcgtcaaattcgacataggcgacccgaatgcaatgatcaccttgcacaagcctcaccccggcaacgaactgaaacactacattcggcgccagatcatcgaacaattgaaatcaggagaactgattcagtgaacaaccaattgaaacaccaaggctacatcggctcgatcgaagccagcctcgaagataactgcctgttcggcaaggttctgttcatcaaggcgctggtcagctatgaagggaaaaccgtggcggaactggacgcggcttttcgtgaagccgtggacgactatctcgccacgtgcgacagccttgggcaaacgccggaaaagccttgcaaaggctcgttcaacgtacgcgttggccatgacctgcacttggctgcggccctggcggcgacccgcaagaaagtcacgctcaatgatctgacgcgtcaggcgctgaatgagtttttgcagcaccacggcgccgatccccatccggcgatcggctgactaacccagccgtcgatagcccagcaccgccgcccccaacaccaccgcgcccgccgtcagcgccacccggaacccgctggtggcgccgaagtggtcgatcatccaaccggaactggccgcgccaatggccacgccaatgctcaggccggtgatcagccaggtcatgccctcggtcaggcggctgggtggtacgatttgctccaccagggccatggacacaatcaacgtgggggcgaagaacagcccggagacaaaaaccgccacggccagcccggggatatgggtcaccagcagtaacggcaaggtggtcagtgccgtcgccacaccacagaacagaaactgccggggcagtggcgccttgagcttgagcgtgccgaaggccaaccccgccaggcacgaaccaatcgcgtacaccgagagcacgatactcgccgccgccggttggccctgatgctgggcgaaggcaacactgaccacgtccaccacccccacaatcacgcccatggccagcagcaggatcatcaagatcagcaccgaaggcgaggcgatcagccagcggccgtgatggtcttggtgttcatgcaccggcggttcggtctcgcgctgcagcacaaaggtggtcacgcccaccgccagcagcagtgccgccaccagaggcccggcctctggaaacaacaccacgctcaggcctacggaaatcggcgggccgataatgaaacacacctcatcgagcactgactccagggcaaatgcggtttgcagtttgggctggccgcgatacagctcggaccagcgcgcccgcaccatggccgacatgttcggcatgcagccggcgagcgccgcaaacacaaacaacagccagctcggggcctgcaagcgcgtgcacagcagcaacatcaacaacgccccgccgccggtcagcgcagcaatcggtagcaccctgccctggctgtaacggtcgaccagccgtgaaacctgcggcgcgcaaaacgcggtggccagggcaaacaccgccgccaccgcacccgccagcccatagccgccatgcacttgcgagagcatggtgatcaggccgatgccggtcatggacaccggcatgcgtgcaagcatgcccgccagcacaaaagcgcgtgcgccacggacctggaacaactcggcgtaggggtttgccatcctgctctacctcttcctcaagcgccttgaaacttgctatctcagcgtatcaaggcagaatacatacgacgcgtatgtttaaatcatgcttaacatacgcggcgtatgtcaatcattcactcacccctgacgagcctttcccatgagccgagcccgtgctgaacagatcgaagacacccgcgcccggctgatcgccagcgctcgcgaagccttcgccacgcaggggtatgcccacacgtcgatggacgactttaccgcccgcgccggtttgacacggggtgcgttgtaccaccactttggtgacaagaaaggcttgttggcggcagtggtggcgcaactcgacggcgagatggatgcacacttgcaacgcatcaccgatgaggcaaccgacctctgggacggattccgcgaacgttgccgtgcctacctgcgcatggcacaggacgcggaaattcagcgcattgttttacaagatgcacctgcggttctgggcgccgctgaatcaagccatcagcaacactgtgtggattccctggccgccgtgctggaacacctgatgcgtgagcgtatcatcgaaccggccgccagccaggcgttggcgcgcctgatcaatggcagtctggtcagtaccgccttgtggatcgctgccgatgaacacccgggccagcgactggacgaaagcctgcaagggctggaactgttcctgcgagggttgaagcaataaccgccagcacgcccgtgcaaagcgtagacacttgaggcagcccttctcccggagcccatcatgcagcgcatcggtttcatcacctttcccggtttcggcgtcatgagcttcgctgcgctgtccgtcttcgagagtgccaacagcgccgtgggcaaggcccattacgatgtcaggctgctctccgaacagggcgggccggtacgcagttccctcggcgtggtggtgcacaccgaacgcttcgacgagactgcgttcgacacggtaatcatcggcggcggcagtgaccgcgaattcaccgcaccgctgctgacctacctgcgccacgccgccaaccacacgcgtcgtctcgcggccacctgctccggtaccttttttctggcacaggcgggcttgctcgacggcatacgggcgaccacccactggttctttgccgcagaatttcgcgcgcgctatccgaaggtccaactggaagaagagcggttgtttgtaattgacgggtcaatctggaccagcgccggcatgaccgccggcattgatcaggcattggcgatggttgaagccgatctgggcccggcggtcgcccgcgccgtgtcgaaaaccttcattcttcagagccgccgcgttgcaggccagccgcagcgctcggtgctgctggatatggaacagaaaaccgaccgcattcaggccgccatgacgtacatgcgcaataacctgcatcgcgccctgccgttgagtgaactggcagacgccgcgcacctcagcctgcgccagttcagccgcgcgtttcacgcacaaaccgggctttcaccggccaaggccgtggaaaagctgcggatcgaggcggccgtggcgttgatccaggatgggcgccacccgctcgacaacatcgcccgccagaccgggtttggcgacagcgagcgcatgcgccgggccttcattcgccaattcggcgagccgccacgggtgatacgacgcacggcgcgaaaccctgaagaagcgagctcaatgtccagaaacgagggttaaatggcctttgtcggtgtttgagctggcctaagcttgacctcagcgaccatcccctgaggaacccttatgaaacgttgtgcactggccgtcggcgccctgttctcgttactcgctctcacccctgctttcgcgaccccgcaagaggacgaaacccgggcgttcttcacacgatttgtcgcggcgcaaaacgcccatgacctcacccggatcaaggccatgctctgggattcaccgaaaatgctctggtttgcccggggcgaagccaactggggcccggatgccgtcgtcagcaaactcaaggagtactacaagggcacctggcaactgcaacccgacatgagccacttcagtgtggtgatgctgaacgacgaggtggcccaactgatggtgccggtcgcctttacccgaggccatccaggcgaacccgctcaggtagacaccttcctgatcagccagacgttattgaaaggcaaggacggctggcacgtcgcaagcatcatgccgctggccgatacccacttcaaataatcacaccaaccgcgtgatctgcttatgccgccacaccaggcggtagtaagccgtctgcaacgccagcatcgccaggtaggtcaccggaaatgccatccacaccccttccaggccgaaatgcgcattgagcaggtaggccatcggcagttcaacgcacagcacacagaaaatcgagatcgccaccggcatcagcaccacgccgctggcgcgcatgatcccgccgaccaccgcctggaaaccgaagaccagaatgctccacagcatgatatgcagcaggtgttcggcattgagtcgcgcggtgtcgtcggtgataaacagccccagcaaccagtgcgacaacacgtagccaagcacaatcaaaccacccgtgaggcaggtattgatcatcagccccgtgcgcaggatcggcccgatgcgctccaggcgcccggcaccaatggcctgggccccgaggatcgacgcggtgatcgcaatcgacagcgccgggaactgcacataattgacgatctgggtcaccgcgccataggccgccgtggcctgggaaccatggctgttgaccagggccaggatgaccaattccgacagcgacagcaccaccatctgcaagccggtgggcaggccgatgcgcagcaccttgccgagaatggcgcggtccaggcgcaaggcggcgagcaactcgcggtccggcgccatcacatggtttttatggcgcaggcgcaggaccagaaacagcatggccgaggcattacccaccaagcctgcgtacaccgcactctgaatgcccatgggcggcaggccgatccagccgcgaatcagcgccggggtcaacagcaagccaaccagtgttgaaaccatcaaggccagcagcggcgaaatagtgtcgctgacaccccgcaacaactgggtataaaggatgaacaccaagagcagcggcatgatcagcatcatgacctgggcgtagccgactgcgtcgtccaacacatcgatcggcgtgcccagggcctgcaacgccgggcgcgcaaacaggctgcccaatacggccgcgatcaagccgaccagcgccccgagggtcagggttgcgccggtaatcaccttcaccagcccggtttcccgggcgccccacgcctgcccgatcaacaccgaagcgccagcgcccagcccgatcaccagggcaatgaaaaaaaacacaatggggaacatccccgacaccgccgccagcgcctgggtgccgagcatttgcccgacataaatgccgttcagcgtgccggaaaaactttgcaggaagttggacagcaccatcggtgccaaaaagatcaggtagatctgccacaacggccgtttgggggtgacttccatggtggttcgggtcccggagttattgtcagacggggaaagcattgcgcgacagccaggccagatagctgcgtacgtcgttcggccaatgcgcaatcgtgcctgaaaaaacggccgcatcgctggcaaacagcgcccgcgaggcgtcttcgaaacccggcaggtcgccagcgatggcactcatgaaacgatagctggcttctttggccaggcgcatctgatcacgggaagcatgggcactgcgcgcctcatcgaccaatcggcgcaatgccgccgaggcgccaccgcgttgctggccaagccattcccagtggcgcggcaacaaggtgacctcccgcgcgaccacccccagttttggacgaccaaccgacggcactgccgcgggttcgtcttcgacctcggcaggctccggccgctcgggcgcataccccactggccaggggtagtcgacctggctgccggtggcgtcatcaaagaccaggaaactgccggccgccaactcaaggtttgagagggcgctggcaacgtcagaataggcgccggctgcgacacgctgatgacgaacaaaggcggtacatgcagggagattttgcgtaggcatcttttattacccggatgttatttgttttacccgggttatattagtcaaaacaacaccgcttgcaaggctattgcgcaaaaacttccaagtggttctcgcgcagcgtcacgtgcattgctcgcactgaaggttcacgcagcacacagtcggcaatcgcgggctccaactccacccgcaagcgccggcccaatgcccgcgcgccaaaccgtgcatcatgctgacggcacagccatgcccgcgccggtttatccacgctcaacgaccgctgctgcgcggccaggcgctgattgagtttgcgcagttccacatccagcaatgcctccagccactggctgtcaatcggctcgaacatcaggattcggtcaatgcggttgagaaactccggctcgaaatgcccgtgcagcgcctcttccagcaccgccgcctcgccccgcatgaagacgcgtaacaggcggcgccagccatacgcaaacctttggcgatggcgccgcgcctgctgcgcaccgatattgctggtcatgaagatcaggctgttgcgaaagtccagcgtgcgcgtgcccccggccagggtcagttggccgttttccagaatgccgagcaggctgcgcaccacctcctggctggctttttccagttcgtcgaacaacacgatccccggccggctgtaagtgccctggatcaactcgctgttgaacaggctgatgccctccttgctgcccacataacccggcggcgcgccggtaagcgcagcggcgtaatgctcctgggccagggtgtgcatgtcgatgcggcagaaactgtcggcacggccgtgcagcgcctgggccaacagccgcactatttcagtcttgccgacgccggtcggccccatgaacaggttgacgctcagcggccggtcacgctcgccgatgtcggccttgaccactttgagcagcccttccacctcggccagcgcggcgtcctgccccacaacccggctgcgcaacaacgccatcacctgggccggttcaaaggtaaaacgcatgccctactccaccgtcttttcttgaccgccgtgcggcagttgccccaccgggcactcggcgacgccgaccgtgccgcgggtaaattgctcgacgttgtcccgggccttttgcgcgtccagcacccaggtgcgatagaactcaaacgggcaatccgccacgcccttgtcgccatcgcccgaagcgtgcaggccggtgtagccacggtgcagcaacttgaacagatggttctgcgactgatcattggcccgcgcatcgcggatctgcgacaccgacaactgcgcgtactgaatgcccatctcctcctcgccacactcgcccagggtgcgcccgtcaaaaccgatgatcgccgaatggccaaagtacgaatacaccccgtcaaacccggcggcgttggccacggcgacatagcagttattggcccaggccatgctcttggacatctgcacttgctgctccttggccgggtacatatagccctggcaacgcacgatcagctcggcgcccttcatcgcgcagtcgcgccagatctccgggtaattgccgtcgtcgcagatgatcaagctgatcttcatgcccttgggcccgtcacacacgtaggtgcgatcccccgggtaccagccttcaatcgggcaccacggaatgcacttgcggtaacgctgcacgatttcaccgaggctattgatcagcaccagcgtgttgtacggcgccttgtgcggatgctcttcgtggcgctcaccggtcagggaaaacacgccccaggtgttggcctggcggcacgccgcagaaaagatcgccgtctcttcgcccggaatgctcgcggcagtggccatcatctcgtcagggtcgtacatgatgcccatggtgctgtattcgggaaacaccaccaggtccatgcccggcaggccctgcttcatgccgaggataatgtcggcaatctttttcgcgttatcgatgacctcagccttgctgtgcaggcgcggcatcttgtagttcaccaccgcgacaccgacggtgtcggggctgctggaaatatcgccatgacgcatcacaatgctcctggtctagtggctgatcatccacggccgtggcccggttttggtcttgagccccaacggattggctttgctgggttcgacttttttactcgtcccgcaacagctacagcccgcaggatggcgacgactctcctggtattcacccacggtttgcggcgcatgcgcgctgcgctcgttgccggcgatggccttgcgctggttggctgaaagaatgcccagggccggcgccgacaccaacagttgcccgccggccgaggcgcaatacgggcattcgctggggtcatggcgctgggcgatggggcgcaacatcgtgaaagtgccgcaggtatcgcagctgtattcgtaggtcggcatggctacaggtccggggcgatgggcaggtcgatgctgccgtcgaggaattgggtcgggccgttcgcgttggggttgatgtcgaattcgaagatttccgtaggcaaccacaaggttgcgcaggcatttggaatatccaccacgccgctgatatgcccctgcaccggcgccgagccgagcagcgcataaccctgggcgggcgagtagccgaacttggtcaggtagttgatcgcattcaagcacgcctggcggtacgcgacgttgacgtccaggtagtgctgctggccctgttcatccaccgagatgccttcgaagatcaagtaattcttgtagttcggcgtgatcgggcttggcttgaacaccgggttcttgattccgtatttggccatgccgcccttgatcagctcgactttcatgtgcacccagccggccatttcgatggccccgcaaaaggtgatttcgccgtcgccctggctgaagtgcaaatcgcccaccgacagcccggcacccttgacgtagaccggaaagaaaatcttcgagccacgggacaaatccttgatatcgcagttaccgccgtgctcacgcggcggcacggtgcgtgcgccggtagcggcggcgtcatcgcgggcctggcctttgagtttgcccatgtgcgcagtggcagcgagcggtgcgttggccagcggaggcacacgggtcgggttggtgtcgatcagcgcttgctcgcgacggttccagtcagccagcattaccgggtcgggcaggcaaccgatcaggccggggtggatcaggccggcaaaattgaccccgggaatgtgccgcgagctggtgaacatgcccttgaaatcccagatggctttttgtgcgctgggaaagtgatcggtgagaaagccgccgccgttttgccgcgaaaagaacccgttgaagccccactgcgagtccgccttggcgccgatatcgagcaggtccaccaccagcaaatcacccggctcggcgccgtgtacgcccaccgggcccgaaaggtaatgcacggtggacaggtccacatcgcgcacgtcgctggcgtcatcgttgtttttgatcgcaccggcggtccagtcgtaggtttccaggatgaagtcatcccccggcttcacccagcaggccatgggaatatccgggtgccagcggttatgaatgttttcgttttcggtgacgggctggttgaggtcgactttgatcagcgtttcggtcatgggctggctcctggacggatgacgtgttgcgttcaatccagtctcaagcgcgcagggcaaacggaaaatacgttggatgacgtataaaacccgagggtcgcgttttattccatcaattcgctcgatggcagggtcagcaattactgattggacgcaccgcccggggatggttagatttcgcgagacagatagcttttagccatcattcttaaccctctgattatcgggcctttcatgaaaaaacctgtctcgttggcgatgcgtatcggactgggcttcgcgtccacactgtcgttgctggtgctgatcaccgccgtcggtatccaacgcgtgggttttatcgacagcaccctgaaggatgtcggggaaaaagccgcggtagcccagcgttatgcgatcaatttccgtggcagcgtgcacaaccgcgccatcgccattcgcgatgccgtgctggtcaaggacgagcccgcgttgaacgcgcacctggctgaaatcgatcagctcaagcgtgactatcaagactccgccgtgatgcttgaccgcctgttcagcacccacgccagtgccgaagaaacccgcctgctgagcgatatcaaagccatcgaagtgcaggccctggcctcctccgagcgcgtgaccaccctgcgccgcagcaacgatatcaacgccgctcaggacctgttgctcgcgcagacctcgggttattacaccgagtggctcaaacgcgtcaacgcgctgatcgactacgaagaagcgcaaatcaaaacacgcctggacacggtacaagccgccgccagccagttcgccctgctgatgatcgccgccagcaccgtggcaatcattctgagcgtgctggtgtcgtggctgatcatccgcaaggtcaaggccaccctcggcgcggagcctgaggaagtggccgaggcgattcgtcgcctggccaatggcgacctgaaccagccgattgaaacccgctaccccgacagcgtgatgggcattctgaaaagcgccctgtcacgcttgggcgacaccatcaccgacgtgcgcgcagccgcccgggccctgcgccaatcctcggtcaccctgctgtcggtcgccagcgacaaccgccagcaaatcaccctgcaaaccagtgaagccgagcatgtggccgccgcgatcacgcaaatggccgcctcggtcagcgaggtctcgggctacgcgtctgcggcatccaaagccacgatcctggccgacgctgaagtcgacagcggccatcgcctggtgggcgaagtcagcatggccatcgaagagttggcgacgatcctcgaccaagccaccacgcgtgttaaccaagtgtccagcgacagtgaaaacatcgaaaccgtgatcgaagtgatcaacgccattgccgcgcaaaccaacctgctggccttgaacgctgcgattgaagcggcacgcgccggtgaacacggtcggggctttgcagtggtggctgatgaagtgcgctcgctcgccacacgcacccaggaatccacccaggaaatccgcgacatgatcggcaaactgcaaagcggcacccaggacgccgccgacatcatgcagcgcagccgtagcctggctcaggtcaccgtgacgcagacccgcgactcccaggtggcgcttggcaagatcagtcaggaggtgggcgccatcaacgcgatgaatgcgcagatcgccagtgcctcggtgcagcagagtgcggcggctgaagaggtggcgcagaatgtcacgcgtatccacagctccaccgtgcaatcggcgggcggctccgaagtggcggaaagcgccaaccgtgaactggcggagctggcagaccgcctgagcaccaaggtagcgttcttcaacgtggcttagagcttgtcgcgcttcatttgcatggtcagggtgaagcggtcggcggggtaaaccgactccgacacggcgatcaacgcgccgacttcatcacggtactgacgcacaatggccaggcccagcgcaccgctctgggccttcaggctcccggccagttcggcggacaattgcaccggccgcacctgctggtccaccacctcgataggccgtgaaaacgccttgcctatcaacgccgcgatcaactcatcggggtgtttgcgcgcctcgggaatcacttcggcaaaggtctgttcggcgtagacatccgtccagcacaacggtgcattgccgtcactggcatcgaccttgatgctcgacacacagaagtaatgcccgcccggctccagccccaggcgccgcgccaacgcgatgtcggcgacgaattcgcgcacgtcctgaatatcacggatatgggtttcggccacttgcaccaggtcggccaccgaagccatcgcctgggaatacccccccttgggcgatgcagcctcgacccgcgtgcccacgcgcttgcgccgcgacaccatgccctggccctgcaactggtcgatggccgcacgcacggtgtggcggctcaccgcgtacagcgaacacagctcgaactcagtcggcaacaacgaccccaccgggtaatggccgctgccaatctgctcgatcaagtccttggccaccgccgcataacgcctctggctcacgctttccattcttaccctcgctgtcgagttgacagtgtatcagcacaggcgtaatcataatgtacggacatattaaatatgtatggtttaaaataacaattaggactttcccatgtcgagtaccgtttttgattccgccctgttccgcgacatgttcggcaccgccgaaatgcgcggtgtgttctccgataaagccctgatcgaacgctacatcgaagtggaagtggccctggcccgcgctgaagctcgctgtggcgtaatcccggccgaggccgccgagcagatcgctgcgctgtccacctatgaagccctggacctggcgctgatgcagcacgagaccgagatcgtcggttatccgatcctgccgctggttgaacagttgtcgaagatctgcggcgacgcaggccgttacgtgcattggggcgccaccacccaggacatcatggacaccgccgtggtcctgcaagtgcgcgccgccctggcgatcgtcgagcgtgatgtccaggcggtgcgcggcctgctcgccggcctcgccgcgcgctaccgtgacacgccaatggccggtcgcacccatttgcaacacgcgctgccgatcacgtttggctacaagtgcgcggtgtggctgagcatgttcgaccgccacgccgagcgcctggtggaactgcgcccacgggtggaaatcggccagttcgccggggctgccggcaccctcgcctcgctcggcgacaagggcctggaagtgcagcaagcgctgatggccgaactgggtctgagcgtgccgcaagccacctggcacgtggcccgtgacgggctggccgaaaccctgaacttcctcgggctggtcaccggttccctgggcaagatcgccctggacatcatgatgatgatgaccagcgagctgggcgaagtgtacgaaccgttcgtcaagggccgtggcgccagcagcaccatgccgcaaaaacgcaacccgatttcctgcgagctgatgtacgccgcggccaaaggcgtgcgccaacacgccgggttgatgctcgacgcgatgatccaggacttcgaacgctccaccggcccgtggcaggccgaatggatcgccatcccagaagccttcgccctcagcgccgcgtccctcggccaagcgaccttcatgctcgccggcctcgaagtgcgccccgagcgcatgcgcaagaacctcgacatgacccagggcctgatcgttgccgaagccgtgatgatgggcctggccccggcgctcggtcgccaggtagcccacgacgtggtgtacgccgcgtgccgcatggccaacgaccaaggcaccagcctgctcgacgccctgctcgcccaaggtgaagccaccgcacaactggacctggccgaactgcaacgcctgaccgacccggccaactacctggggctcgcgccgcagatggtggatatcgcgctggcgcgtgagggggcggttaaacgctgactccaaaaccaatggagtcccctgtgggagcgggcttgcccgcgatagcggtgtatcagtcaacacatctgtcactgaaccaccgcaatcgcgggcaagcccgctcccacaagagttctccagcgttttcagaaccataacaacaacgagatcacagacatgtcatccacccccgccaaaaaaccgctctacaaggacctgaccttccaggtcgtcgccgccatgttcctcggcattgcctttggctttctcgccccggaactggccgccagtttcaagattctcggcgacatcttcctcaagctgatcaagaccgccgtcgcaccgctggtgtttttcacggtggtgcacggcatcgcttcagccggtgatatcaagcgcgtcggcaaggttggcctgcgtgcgctgatttacttcgaggtggtgtcgaccatcgccctggccatcggtttgttgtggggcaacttgctgcaaatcggctccggcatgcacgacgcgcaccccagcagtgccgccgccgcagcggccagcgctgccgtcgccaagggccatgcgcccgcctcgaccatggacttcatctacggcatcttccccgacaattttgtcggtgcgttcgtcggcggccagttgctgcaagtgctggtgatctcggtgctgttcggcttcgccctgctggcgttgaagccggagcgtcgtgcagtgattgaagatggcctgaaccgcatctccgaatgcttcttcgaattcatcaacctgatcatgaagttcgcgccgctgggcgccttcggttcggtggcctacgcggtgggcagcaacggcaccgccgtgctgatgtccctggccaacctggtgttgatgttctacgtcggcatcgccttttttattttcgtggtactgggcgcggtgtgccgcttgagcggcttcagcctgtggcgtttcctcacctatatcaaggatgaaatcttcatcgtgctcggcacggcctcatcggaaagcgcgctgccacgcctgctgcaaaagctggaaaaattcggctgctccaaacagagcgttggcctggtgctgcccaccggctacgccttcaacctcgacggcacctcgatctacatgtccctgtgcgtactgtttatcgccaacgcctacggcgtgccgctgagctgggagcaacaactgggcattatcgcgatcatgctcgtcacctccaaaggcgcagcagccgtgtcaggtggcagctttgtggtgtttgccgccaccgtgaccgccatcggcgtattgcccgccgaaggcttggcgttgctgttcggcgtgtaccgcttcatgtccatggcgattgccacctgcaacaccatcggcaacagcgtggccaccgtggtggtgtccaaatggtccggcgagttctcccaacagaccgcccaggatgaataccaacgcgtgctcggccgtgcggccggcgctgcgctttaagggggcccctgaatgtccagtacacgcatcgaacatgacgccttcggcccggtgaacatcccggccgagcgttactggggcgcacaaacccagcgggcgctggaggtgttcggcagtaaacagccgttccccgccagcctgatccgcgccttcggccagcaaaaacgcgcctgcgcccgtgccaacgcacggcttggcacgctggcgccgagcatcgcccacgccattgaacaggccgcacaggaagtcgccgacggacattttgacgggcatttcccgctgtcgatctggcagaccggctccggcacccagaccaacatgaacgccaacgaggtgatcgccaaccgcgccaatcaacaattgggcagtgaactgggcggcaagtccccggtgcaccccaacgaccacgtgaaccgctcgcaatcctccaacgacagcttccccacggtgatgcacctgaccacggtgctggaactgcgcgggcgcctgctacccgcccttgagcatttgcgtgatgagctggatgccaaggccgaggcctggcaggacgtgctgaaaattggccgcacccacctgatggatgctgtgccgatgacccagggccaggcctttggcagctttgcccagcagatccggcacggcatcgcgcgcatcgaagcctgcatgccacgcctgcgtctgttacctcaaggcggcacggcggtgggcaccgggctgaacaccccagccgggtttgacgtggcgttctgcgaagaaatcagccaactcacaggcgagcgcttcactcccaacccgtgcaaattcgagggcatgggcacccatgatgcgttggtggaagtcagcggcgcgctgaacgtactggcggtgtcgctgaccaagatcgccaatgacatccgcctgctcggctcgggcccacgctgcggcctgggcgaattgatcgtaccggacgacggcctgacctcctcgatcatgcccggcaaacgcaacccgaccatcgccgaagtgctggtgcaggcggcgatgcaggtgatgggcaatcacgtcactgtcaccctggcgggcgcctccagcaccttcgagctgaacgtggccaagccggtgttggtccacaacctgctgcaatcaatcgaggtgctgaccgattgcatcaacctgttcagccacaagctgctcaacggccttgacgtcaaccggccgcaattggcgcgcaacgtggagcattcgctgttgatggccacggtgctcaacccggtgctgggctatgaccgcgtggcgcaaatcacccgcaaggcggcggatgaaggtttgtcacccaagcaagcagccgtgcaactgggcttcatgagcgccgaggaatacgcgcaacgcgtacggcccgaagcgatgatccgccctaccccatagccggcggcatctggaacccgccgaccacctcggccaggcactcggcgaacctgatcgtggtgcggtcctcaaaaggcgcgccaatgatctgcacacccaccggcagcccttggcgggtgaggccaatgggcgcgttggtggccggcaggcccatcagcgtggcgggcgcgatccattggtagaggtcggcgtaatggcgttttttaccgtccaccttcaggctgcgcaggctgatgacgctggagtgatcatgggcaaacgccgtggtgaaggtgggcggtgcgaggatcacgtcgaagtcgtcgaaggtcttgaggaaggcttcgcgcaggtgcaggccgtgctcatgggccagcagccagtcggcatggctcatgccggtgccttcatagaacttgtcagcatggcggggcatgtctattaccccgcccagcacacgcaacaccggcgcgatcaggcccatgaagcggcggcgggtggcaggcagcgacgcacccaacttggcgcccagctgcagcaggtacgccgcaaacagccgttccagcgacgcgccggcaggcgcgccctgcaccacctcgacccccgccgcctccaattccagacgcagctgccggtaggcctcggtcatgtcgctgtccagggggcaatcggcgtcttcggtccacaacagcacgcgaaatgccttgagggtcgcgcggcgcggcgcaggcagttgaacctgcccgccggcgatgacgtccagcagcacttgcaggtccgcagcgttgcgcgccaacgggccaacgacattcaggtgcccttctgccaactcacccggcgccccgggaatatgcccgcgttgaggcacgaggccgtacgtgggtttatgcccgtacaccccggtgaagtgcgcggggatacgaatcgagccgccaatatcgctgcccagttccagcggcgtaaaacccgccgccaacgccaccgccgcgccccccgaggaaccccccggcgtcagcgccaggttccaggggttgtgggtggtgccaaacaggcggttgtaagtctggatatccccggccatcgccggcacattggtcttgccgaacacgatggccccggcatcttccaggcgcttgaccgccgccgccgatttgcgcgggcgatggtcccgcagcgtcgacgcgccggcggtacacggcatgccgagtacttcaaaggtgtccttgatggtcatcggcaagccatgcaaaggccccaacggcaggccattgcgtaccgccgtatcggccagatcggccttgagccgtgcttcttccaggttcagcgcgacaatgctgttgagcgccgggtcgagcatgtccacacgagcgatgtagctttcgagcaaggcacggctgctgaggcggccggccgcgatgtcggcgatcaactcagtggcgctgcggtaggtgctgtcggtgctcacggtgtttcaccgctaacgtgcaacgtgtcgaggtgcggcatcagcaccacgctttcctgttcattggggtcagagcgtgccaccagcaccgacaccggctcatcggtgtcgttgtaaggctgatggggcatgcctgccggaatgtagaaaaaatcgccggggtgaatgaccgcgtggctttccagttgctggccataccacacgctggacacgccgctcagggcatagatcgcggtttcatggccttcatgcatatgggtcctggcccgtgcgccggccgggatgctgacgatttgcaggttgatcccggtggcgcccaccgtctcggtggaaatccccacggcgttatacaggccttgcttgccaatcacggcagcgcggggacgaagcaggtggcaggtcttgttgtcggtcatccgggtaggctcggtgtgtgatcaggtctatcggtgaacacctgagcccgccgggttattccatggttactgcacgttgcgctcctggaaattaagccccacaaacctcagcaacggttcggagcccggtacccagaaatcatgattgtgcgcacccgggcgggtctggaacctgtgggcgataccgagcttgttcatctccaggtgcagcagcgcattgccgaggaagaacgggtcgttggtgcccacgtcgaggtagtaccgggtcttgcgcaagtcgtcgaccggggtgtgtttgagcacatccagcacgtttttctggtggtattgcgcgttaaggcgctgctcaccgctcaaaccttcgccccaggcgtggccgtaacggcgttcgtagccggcggcgtccatctgggtgatctgttcatcggtgcgcaccgccgcactcatcacagcggccgcgctgaacaggtcagggtatttgaaggcatacatcagcgaagcaaatccgcccatggacaacccgcccatggcccggaaacgcttgtcatcgaggatgcggtagcgcttctgcatggccggaatgaactcgtgaatgaacatggtctcccactggaacttgccgtcagcgtcgttcatgaaatacgtggcgtatttgttctcggggttgcgcaggccgtcgggggtgatgacgatcatcgccgggatggcgccctcagtgatcagccggtcgagcaaggcgccgaggttgtcttgcacaaaccagtcgttgtaacggccgtcatcaccgccatgcatcatgtacagcaccgggtaggaccgcgtggaatggctgtaatcgggcggcaggtagaccgtgtatttcaccgcctggcccagggttttgctggcgatcgaggcggtatcatcgacgctgccggtttccgcatgcgcggcgaggcctgtcaacatcaggctggcaaacagcaccagggcacggcaaagggtattcaaaggcatcgcgttggctccaacaggctgatcaaaggttagttcaccgcaccgggggcccgtattgaatgccaccgtggttccacaagttattcaggccgcgatcaatcgccaggggggtatccggcccgaacgcacgcgcgaacacttcaccgtaattgccgacctgcttgacgacctgcaccacccagtccctcggcagtttcaggtccttgccatactcgccatcggccccgagcaaccgcgccacatccgggtttttcgtggcgctggcctgggcctcgacattcgccgaagtcacccccgcctcctccgcattgagcatcgcaaacagcgtccagcgcacgatgctgaaccactcgtcatcgccccggcgcaccgacggccccagcggctccttggaaatggtctgcggcaaaatcacaaagtcggacggcgtggtcatctggctgcgctgggcgttgagctgggacttgtcggcggtgatcacatcacagcgcccggcctgcaacgccttggcggtttcttcggaggtgtcgaaggtgatcggcgtgtacttgagcccgtgactgcggaaaaaatccgaggcgttcagctcagtggtggtgcccgcctgaatacagatcgaggcgccgtccagctcgtcggcgctggtcacgccgagcttcttgttcaccatgaaaccggcgccgtcgtagtaggtcacgccggcaaacaccaggcccatgccggcatcgcgcgagctggtccaggtggtgctgcgcgagagaatatcgatctcgcccgattgcagcgcggccaagcgctccttgccgttggtgggggtgaaacgcaccttgtcggcatcgccgaaaaccgctgcggccacggcgcggcaaaagtccacatccaggccctgttgcttgccgtttttgtcggggaccgagaagcccggaatgccgtcggacacgccgcactggataaagcctttcttgtgaatcgcgtccagcgtggcaccggcctgtgccaggccactaaaacccagcaccgcgctcgcgatcatcaacgacttgaaggttttcattgcccatctccgtggctatcgtgcagggaaaacgcctgttcgaggtcagcgatcaggtcgtcgacgtgctcaaggccaatgttgaaacgcaccaggcggtcgccgtacgagcgcacgtcgcggctgaggttgaaatgcggcgcgaccaggctggtcacgccggcccagctgtagccgatatggaacaggctgagccggtcgatgaaatccagcagcgtttcaccactcaggcccgcaccgaataccaccgaaaacacactggtggagcccgtgaaatcgcgctgccacaggtcatggcccgggcaatcgggcagcgccgggtgcaggactttgtcaacttccggccgccctttgagccagtgcgccacttgcagcgtggcgctttgcaaatgggccaggcgcacccatagggtctgcaagccgcgcagggccaggctgcagtcgtccggcgaaaccgccatgcccaacagcgagcgcgccaggccaagggcttggtagtgggcggcgttgcgggtggaaaccgagccgaggagcaggtcgctgtgaccgccgatatacttggtcaacgcctggatcgacacgtccaccccgtgggcaaaagcgtcgaaaaacacgccgctggcataggtattgtccagcgccagcaccgcaccgcaggtgcgcgccacggcggcgatagcgggcacgtcctggacttccatggtggccgagcctgggctttcacaccagatcagccgggtgttggggcggatcagcgcagcgatatcggcgccgagcatcgggtcgtaggtctgcaccgtgatgccgagtttggccaacagttcacgggccagatcattgttggggccgtaagcgctttgcggcaccagcacatggtcgcccgccgcacaaaaggcgaagtacaccagcgcaatcgccgcctggccgccgggggtgataaagcagtgttcagcgccttccagttcggcaacgcgcgcggccagctcaaggctggtcggcgtgccgtgcaagccataggcgtagggcacgcgttcggggcaccaatcgtcacgtacgtcgcgggcgctggcaaacagcgtggtggagccgcgatgggtggcggtggctagtgagcgaaagccggccggcgcacgtgcggtggggtcgagcacagtggtttgtctatgtcggggcatggggatacctccacgtccaggtggcagggaaacgaatcgggggtgaagtggcgcagcgcgccggccacttcggagggctcaagcgaccttggcttggccgaatggcgcgagcgcccgcgcaatggtgccggccaggccgcgaccgctaaggtggccggggtccatgtcggggttgtagatggtgaactggataccgatggcctggggggactgcatggccgtgcgcaatgtggtcgccagatcgtcccacgagaaaccgtccggttgcgggtggtcgcacgcccacatgatgccttggtcgagcacgtccacatccacgtgaatccagaaaccttcagggccgtccacccgcgtcaaatgcgccaccgcttcttccgccgctgtctctgtgcccagaatgcgcacttcattgcggttgaacgccagcagcgcttcggggatcggctggcaacggttgcgcgcctgaatcgcgccatcgcggtaaccgaacagcaccacatcctcatcccgcagcaaggggcgccgaccttcgatgtctgcgaccaccgccgggccgcggcccgtggcgtagcccaggtcgctggctgaggcagcaccggagatcgggttcttttcggcttcatagaagtcagcgtggccgtccaggtagaacagcccgaaacgtccacgacggcgcagccccagcagtgtgccaagcaggatcgagcagtcgccgccgatcaccaccgggaactcgcccttgtccatcacctcgccgactttgtctgccaggttgattgagtattcgttgatggcgtgggggttcatgatttgggtttccggatcgcgctcttcgcgccacggtggcgactccacccgtccggcaagccgtgcgcccaagcgctgcgccaatccagccttgagcaacgcgtcaggcatacgggccacgcccaggtgagtgggaatatggccgagcacggacggggcttcaatgattgcgaagttacgcatggaacatcctctctggtttctctcgggtttaatccacggcggctgtttttcttcgtgccgctacgccgaggtcatcgcagggagtgagccaatgtctgttttggatgtggatattggttttttaaaatcagaatcggtcatgaatcagttgtctattgaccgaattatcgcgcctctaataactgcctctcttcgacagtggtcgcgccacttaagcttatttgaaacctcactaagtaaacgcctcacttgagtgcacttgtaacgttgaaatgccccactgtgtcgcaaagtagcaatgaactaaaaagtgataaccctcacaaaaaatcaattaaaaccaatgttataggggattaagcaaacaaccattccgcatttgaccgacttctactggttaaaaacaacattcccacacccactccctcggctggcacagtcactgctctttttatcggtattcaagtttcgtgatcgatataaggatcaggcaacaccatgaacccactattctccaacgccactgaaagttatgacgtggcaatcatcggcgccggcgtcatagggtgcgccatggcccggcgcttcaccctcgaaggtgcacgggtgctgttgctggaaaaaggcacggacattctctcgggcgccagcaaaggtaacagtgcgatcttgcacacaggctttgatgcgccaccgggcagcgtcgagctggcgtgcatgcaggcgggctatcaggaatacctggaaatccacgggcgcatgaacctgccgctgctcaagacgggcgccatggtggtggcctggaatgaagacgacctggccagacttgacggcatcctgcagcaagcccatgccaatggcgtgagcgacgcacgcctgcttggcgccgaagacattcgccgcgcagaaccgcatttggcacacggcgcacggggcgcggtttcggtacccggggagtacctgatcgacccctggtccgcaccgctcggttacctgcaacaggccctcgcccatggcgccaccgtgcacaccgccactgaagtggaggccgggcatttcgacggccagacctggcggctgtcgacccaccgtggcgccttcctggcccacaccgtgatcaattgcgccggcttgttcggcgaccgcctggaacaccgcctgctgggcgacagtgcgttcagcatccacccgcgcaaaggccagtttgtagtgttcgacaaagcggcctcaaccctgctcggcaacatcatcctgccggtgccgaatgagcgcaccaagggcatcgtgatcacccgtacggtgttcggcaacctgctggtcgggcccaccgccgaagaacaggacgaccgcgatcacgccgggctgacgcctgccgtactcaaccaactgatcgacgccgccgtggcgcgcattccggcgctggagggcatgccggtgacagcgacctacgccgccctgcgcccggccagcgagaaaaaggaataccgcatccatgacaacgccggccagcactggattaccgtgggcggcatccgctcaaccgggctgacggcggcgctgggtatcgcgcagcatgtgttcgagctgtatcgccaacgcgtgcaccacacgcccgtgactcagtgggtttggccacacatgccgaacctcgccgagcacttgccccgggactaccagcagccaggtttcggtgaaatcgtctgccattgcgaatgggtgacctcgcgggaaatccaggccgcctttgacagccccctgccccccggcgacctcggcggtctcaagcgtcgcacgcgtgcctgcatgggccgctgccagggtttttactgcggcgcacgggtggcgcaattgagtgcagggcacctcgcgcagccactggccacgggagttgcccatgaagcctgactatgtggacgtggcgattattggcagcggcccggccgggttgtcggccgctgtcgaactgcggcgccagggcgtgcagcgtgtggtggtgatcgaacgcgagaacacgcccggtggtgtgccccggcactgtggccatccgccgtttggttttcgcgagtatgggcgaatttactcgggccccgactatgcccgacgcaacgtcgccgaagcccgctcggccggggtcgaactgcggctgggccacaccgtgacgcacttggggcaaggcggctgcctgcacctggtcagcactgcgggtgccgtaacgctgcaagccaaacgtgtgttgctcgccaccggcgtgcgggaaaccccgcgcgcggcacgcttgatcggcggcgaccggccgctgggcgtcatcaacaccggcgcactgcaagcctatctctacctgcacaacctcaaaccctttgaacgcccgttgattatcggtaccgagctggtgagcctgtcctcgatcctcagttgccgccgtgccggtatcaaaccggtggcgatgattgagcctaacgttcgcgccaccgcacgctggccgttgtcgctgttccccaggttgtgcggcgtgccgctgcattttggcgcgcagttgctggacatccatggcaacggccgtgtggaagccgccagcgtgcgcctggccaacgggcagttggcgcgtttcgaatgcgatggcgtgctgctcaccggcaactttctgccggaagccagcctggtgcgccagagccacttgctgctggaccccaacagcggtggcccggtgatcgaccaatacgggcgctgctcggacccggcttatttcgccgcaggcaacctgctgcgcccggtggaaaccgccggctggtcgtaccgcgaaggcgccagcatcgcgcgcctgctcgccaaggacttgcgcggcgagatccccacggcccaccacaccctcgccatccgctgccgcgcaccgttgaaactctgcgtgccccagcgtttcgcgccgaccggcgtggcgggcctggaacacctgcaattgcgagtcagccaagccactgaaggcgagctgaccgtgtatgccgacggcgtgccggtctggagcaaacccatggcctgcctgccggagcgacgcatcctgattcctgtcgcggccctcaaactcaacgccagcatccagcaacttgatgtcgactttgtcggccatgcacacgccacgccggcccaaggagacaccccatgaaaattgccgccctcgaccaaggcaccaccagcacccgcgtgctggtggtgagcgatgacggctcggccgatatccagctcgccttgcgccatcagcaacatcatccgcaaccgggctgggtcgagcatgacccgctggagctgctcgccaacctgcaacgctgcctggaggccaccgggcaggtggacgccattggcctggccaaccagggtgaaagttgcctggcgtgggacgccatcaccggcaaaccgctgtcgccggtgatcgtctggcaagacaaccgcaccggcccggccattgaaaagctgcgcgcagaaggtggcgaaagcctgaccctggcccgcgccgggcttgcgctggacgcgtatttttccgcgagcaaactggcctggatcctcaaccacttgcccgccgcacaacaggcgcacgcagccgggcgcttgcgcctgggtacgactgacgcgtggtttctcgaccgcctgaccggggtgtttgccaccgacgtcaccaccgcctcgcgcacctcgttgatgaacctcgccaccgggcaatgggacccggagctgtgcgaactgtttggcgtgccgatcgaaaccttgccgccgattttcgacaccgtaggccatttcggtgaaatcggtgccacgccggtgacggcctcggtggtcgaccagcaggcctcgctgtatggccacggctgccgccagccgggtgacgcaaaaatcacgttcggcaccggcgcctttgcgctgaccctgaccggcgacgaaatcatccgcgccccggaaaaaggcttgctcgccaccctcgcctggcaaatcgacggcaagccggtgtacgccatggacggtggtgtctacgacgccagtgccgccgtggaatgggccggtcgcctggggttgttcaccgacttttccgagttggccggcttcgaccaaccgcctgcaatcggccgccaattggctttcgtcccggcgctgtcgggcctggcgtgcccgcattgggaccgcagcgccgcagcattgtgggtgggcatgcacggcggcaccacgcgccacgacatgtgccaggccctactcgaaggcgtggccctgcgcagtgttgaagtgatcagcgcgatggaccagttcctcagtgtcaccgaccgcctgtccatcgacggcggcctggcgcgcagcccgtatttcgcgcagttcctcgccgacgccctgcaacgctgcatcgtcacccaacgcttcgacgaactcaccgcgtttggctgcgcagccctggccgcgcgcggtttgggcaagaccctggtcgcgccgcgcaatacctgcaccgagttccacccacgggtcagtgcggccaccgcccgggcctggagggacaccttcagcgatgccgtcagccgctgtcgcacctggagataaaccacagggaagtgcatcaccccgttaagcctcaggtttcgctggttgctccgccaacccgtgcgccgagccttgtcctctgcttttttgaaggagacattccaatgtctgacaccctttcgagtccgcaaaccgttttacccgataaaaacgctgagagtggtaccggctacaaggaacaattcgaacgctccctgggcaagttcgaatccttcgccgtcgcgttttcgtttatctccatcaccaccgggctgttttccacctacggttcggtgctggtctccagtgggcccatcggcatgtggacctggcccatcgcaaccctcggcacgctgttggtggcgctggtgtttggcttgctggcaagcaagatcccgttgtccggcttcagctaccagtgggccagtcgcctggtcaacccggtgctgggctggtggtttggctggatgagttttgcgtttatcgccgtggtgttgctggcggtggattacgggctggcccaggtggcgctctttcccctgctggggctggattactcccctgccgccggggccatcaccacagtggtggtgctgtttatccagatgctgctgatcatctggtccacgccgatcctcaccaaaatcaacaacatggcggtgggcgcggaagtgatcgcgatgatcggcttgatcgtcggcattggcatcgccgtgacggtgttcggcaaaggccatgcgtcgaatttgctgtccaccggcatcgcccccacggagcactactacggctggctcggcccgttcatgctgtcgggcttgctcggtgccttcaccctggtgggctgggaagccgccgccaacctggccgaagaaaccctcaaccccaagcaagtggtgccccgggcgatggtccatgcggtgctggccagcggggtgatgggcacgttgttcctgatggtgatcggcatgggcctgggcgatcaggtggcggaactgagcaaaagctcggcgccggtggccgatgtgatccgcatgaccctgggtgaaaccctgagcaagatcattctggtggttgtgtgcattgcgatctttgcctgcggcctggtgatcatgaccagcaacagccgcctggtccacgccatggcccgggacgggcgcctgccgttttccgacgccctgagctacgtgccacgccccaccggcggcccgctgtgggcaaccatcgtggccgcgctgatcccgatgatcatcgtgctgagcttctacagtgacgccgatgccctcacccaaatcctcggcgccgcgaccctgttgcccgccctgctctacagcgccacggtgttgctgtacatcggcactcgccataaacagctgcaccacgccgatgacttcaccctgggcaagtgggaatggcccgtggtggccggcgcgtgcctgtggctgtttgtggagctgtgcgtgttcatgattccggcagattttcgcgtagcgcagctgtatgtgctgggcctgatcggtgttggcgcggtggtattcgcctgtgtctgggtcacccggcgcaagcagctggaacagatgccgcccatgcagcattacctgtagctaccactgcagtttagggctggcaggcgcctcatgcacctccacattggcccgggccaacgcgctgcccagttcccccacgggctttcgatcaatgatcaaacggtcgatgcgctccagcgggaacacctggaacagggcgctgcgaccgagcttggacgagtcggcaaccaccgtgaggtaacgcgcgcgggcaatcatcgcacgggcgatttctgcctcttcgatggagaagtcaaacgcgccatccacgctcaatgcgccaatggtgaccacggcgtgctcggcgttgaaccgcgcgatttgctcaagggccagggggccgctgttctggttggattcggggcggtactcaccaccgatcatgaacacccgattgccgctggcgcccatgctgtcggcgatttgcagggagttggtgatcaccgtgatgcggttcaggcgcgccagttcgcgggcgaaaaacagcgtggtggtgccggtgtcgatgaggatgctgtcgcccggcgaatacaggcccgcggcataacgcgccacggcgcgtttctcctgggagaactcgttcatgcgggtctggaacgcgttctcatgctcgccgcgcggcggcagcgaagcaccgccatgaaacttggtgacctggccgctatccgccaggtcggcaaggtcacggcgaatggtttcgtgggaggcgctgagagtgcgcgccaattcgtcaacggagatgcgttcacgttggcggagcagttcgaggatggagtggcgtcgctcgttggggcgcatggcgggctctgaaggtgagtggggacagcgtcaaaactagatgggttcggtcaccaaatcaacaaataaaccacacaaccatttccattcattcaaaaaaacgaggtatttatgcgaaaaatctttctcgcctgcccttacagccatgcggacgcggcggtggttcacgagcggtttatcgcctgcaatgcggtagcggccgggattatcgaggcggggcatgcagtgttcagccaggtctcgatgtcacacccgatcaatcaggcgtttgcgggcaaggacagcgccgcggttggcaagctgtgggcgccggtggatgcggtgtttatggaactgttggaggaactgatcgtgctggatttgccggggtgggaattgagcggggggatcaagcgcgagattgcgttttttgaagcgagggggcgccgggtaagcttgtggtcgcaggttgatcaggaattcatctgagacaccgagatcaaaatgtgggagcaggcttgcctgctcccacgccggttagaccgacaggtagcggctgatcgtcgcctcatccacccggtcgcgggtttcttcgatcacgaaacggcccttctcgatcaccaggaagcggtcggcgatttccagggtgaatgacagcacctgctcggatacgacgatggtcaggtcccgcagggtgcgaatctctttgagggtgcgcgcgatgtctttgatgatcgacggctggatgccttcagtgggctcatcgagcagcaacaccttggggttggtcgccaatgcgcgagcaatcgccagttgctgctgctgcccgccggagaggttgccgcccttgcgtgactgcatgtcatgcaacaccgggaacagcgcatacagatcctccggcactttgccccgcgcggaagcaggcaagccggtctggatattttccagcaccgtcatgctcggaaaaatcatccgcccctgcggcacataggcgatcccgcgttccacccgctcatgggtttccagcgctgacacgtcgtgtccgtccacactcacctggcctttccactgcggcaaaatccccatcaggcttttgaacagcgtggtcttgcccatgccgttgcggcccatcactgcgacaatctcacgcttggccacgttcaggtccaggtcgtggaggatctggctctgcccatagccgcaggacaattggtcgatcttgaacatgccggactcctcagtggcccaaatacacttcgatgactttagggttgctctgcaccgattccatactgccttcggccagcaccttgccctggtgcagcaccgtgactttgtgagcgatgcttttgacgaattccatgtcgtgctcgatcaccagcaccgaacgaccctggctgatgcggttgagcagctcggccgtctgcgcgcgctcgttgacgctcatgcccgccaccggttcatcgagcatcagcagctcagggtcttgcatcagcaacatgccgatttccagccactgtttttgcccgtgggacagcaggtcggcctgctgttgcaacaggtcgccgaggaagatctcccgcgccacctcttccacccgtgcaacaacctgggcgttgcgcttgaagaacaacgcgccccacaccttgcgcccggccggataggacatctcgaggttttcgaacaccgtgaggttttcgtagatcgaggggttctggaacttgcgccccacgcctgcccgcacgatgttgtactcgcgcatggtggtcagttcctggccgtcgaactggatgctgccgctggtggcgcgggtcttgccgcagatcaggtcgagtacggtggtcttgccggcgccgttggggccgatcactacgcgcacctcgttgcggtcgatgtagaggttgaggttatcgaccgccttgaaaccgtcgaacgatacggtgaggccttcgatggccaacaccggttttttcatttcgaagccgacggcggtcatggctgggtctccaggattttggttttagccttggctttgaccggggctttcaccaccggtgtacgccgcagcaatttggccaacgcttggcggccatggctctcccacaacccggccaggccgttggggaagtacatcaccacggcaataaacaggccgcccatcaaatacagccacaactcggggaacgactcggaaaagtaagtcttgccgtagttcaccagcaacgcgccatacaccgcacccagcagcgacatgcgcccgcccacggcggcaaaaatcaccatttcaatcgacggcacaatgcccacgaacgagggcgacataaagcccacctgcaaggcaaacatcgccccgccaatcgccgaaaaggcggcggccacgcagaacacgaagatcttgaaactggccacgtcatagccggaaaaccgcacgcgttcttccttgtcgcgcatcgccatcagcaaccggccgagcttggaggcgaggatgaagcggccgataaagatgcagccaaacagcaaaccggcgttgatgaaatacaggatcagcttcgcgctgtcggtgcgcaggtcccagccgagcagggtcttgaggtcggtaatgccgttgacgccgccggtcaggccctgctggccgacgatcaataccgtaaggatcagcgcaatcgcctgggtgacgatggagaaatacacatcgcccacacgccgcttgaacagggccaggccgatcacgaacgccagcagcaccggcaccgcaatcaccgccaccagagtaaaactgaagctgtgaaacggctgccacagccagggcaattcggtgatctggttccagtccataaagtccgggatgcctggggtggactggattttggtgctctcagggtccgacgcttccagcttgagaaacatcgccatgcagtagccgccgacgccgaaaaacacgccctgccccaggctgagaatgccgccataaccccagcacaacaccagccccaccgcgacgaacgcgtacgtcaggtacttgccgaccatgttcaggcggaacgcgtccagggtcagggggaataccaccagaatcagcagcgccagcagcacaatgccgatcaggttttgctggccgcccagcagcttgtctaaagccttcatctgctcgcctctacttgcgcactttgatggagaacaacccttgcgggcgcagcatcaggatcagaatcaccgaggacaaggtcagcaccttggccatcgagccactgaggaaaaactctgacagcgattgggtctgggcgatcacgaacgccgaagcgatggtgccgaacaggctttgcgcgccgccgaacaccaccaccaggaaggtgtcgacgatgtactgcgaacccgccgtggggccggtggaaccgatggtggtaaacgccgcacccgctaccccggccacgccacaaccgagggcgaaggtcatgcggtcaaccttgcgcgtgttgatgcccaccgcgcggctcatcaagcggttctgcaccgtagcgcgtacctgcaagccccagcgtgagcggtagagcatcaggaagatggcggcggtgagcagcaaggtcaggcccatcatgaacaggccgttgcgcggaatttcgatggcgtcggtgaagttcaccgagcccatcagccaggccggcggttcggcgctgacttcacgggcaccgaataccgagcggaaggtttgctgcatcaccagggacagcccccacgtggcgagcaaagtgtccagcgggcgcttgtacaaacggctgatcatcgcccactccaccagccagccgacggcgccagcgaccaaaaaagacagagcgatggcgaaaaaaaagtaatagggctgaaagctcggcgcaaaatgcgccgtcaggctggaacacacgtaggtggtgtaggcgccgatggtcaggaactcgccgtgggccatgttgatcacgcccatctggccaaagatgatcgccaaccccaatgccatcagcaacagcacgcagaacacggacaagccgttgaacccctgcattgccgcgatggctccaaattccgatagccattccatgatgatggtctcctgagcgggaggttgaaatgcaatgtgcttgtgctttatgtgggagctggcttgcctgcgatgcagacacctcagtctttcagtgacacagaggtgatgccatcgcaggcaagccagctcccacaaaagcccggtttacacagaaagggttattggtagcctttcgggaacgggttcggctcgatcagatccgactcgtagatcaccttgaactgcccgtcaggctgcacttcaccaatgcgcgacttgctccacaggtgatggttctcgtggatcttcacatagccttccggcgcggttttcagctcgatgccaggcgacgccgccacgactttatccacgtcgaaactgccggccttctccaccgccgctttccacaaccatggcccgagataggcggcctgggtcacgtcgccgatcacggcatccttaccgtacttggccttgaaggctgcgacgaaggctttgttgttcgggttgtccaggctttggaagtacttcatcgaggcatagaaacccgccatgttttcgccgccgatgccgagcagttcgtcttcagtcaccgacagggtcagcagcgtttgtttggatgagttcacgcccgccgcgttgagctgtttgtagaacgccacgttggagccacccaccaccgctgcgaacaccacatcaggctttttcaacttgaccttgttgatcagcgagccgaactgcgtgttgcccagcgggtagtagtcttcgccgacgacggtaccgtgcagcacgttttcaatgtgtttacgcgcgattttcattgaggtgcgcggccagatgtagtccgagccgaccaggtagaaggtcttggcgcccttggtcttggcgatccagtcaaggctggcgaggatttgctgggtcgcttcttgcccggtgtaaatcacgtttttcgactgttccaggccttcgtagaaggtcgggtagtagagcaagccgttttctttttcgaagatcggcagcacggctttgcgcgacgccgaggtccagcagccgaacacggcggcgaccttgtcgttgaccagcagcttcttggctttttcggcgaaggtcggccagtcggaggcgccgtcttcctggatcaccttgatctggcgtcccaggatcccgcccgacgcgttgatctgctcgatggccaggcgttcggcctggatcgaaccggtctcggaaatcgccatggtgccggtggccgagtgcaactggccgacggtgacttcggtgggggtcacggccaggccttcgttgtcggccagcgcgccctggctgaacagagcggcggccagcagcgacaaggccaacagcggtgtggagcggatcaatcgtagtgccatggggcgactcctctgcaatgagggggtcagcatggcggcaggaggccagcgcgggtatacgcagcctgacgtaaccgggtacgtcatttgacgtatgccgccgcgcacctttttcgagcaggatcccgcccgccccaacacctcatgcccctgtgggagctggcttgcctgcgatggcgatccatcaggcgccatctgcagtgcctgacccagcgctatcgcaggcaagccagctcccacattttgaatcggggcatggaatttgctcacccatcatgcccacctcccccggagcctcccaccgtgcaccctccttccggtacccagcgcatcgtcaagatccgccgcgactacaatacctgggtcgccgacgagaccatggaagactacgccctgcgctacacgcccaagtcctttcgcaaatggtcggagctgcgcatcgccaacaccgccctgggcgccgtgtcgttcctggcgctggaagccatcggcggcgtgctgtccttgagttacgggttcaccaataccttctgggcgatcctcgcgataggcctggtgatctttctcaccggcctgcccatcagctactacgccgcgcgttacggcgtggacatggacctgctgacccgtggcgccggcttcggctacatcggctccaccatcacctctttgatctacgccagcttcacctttctgttctttgccctggaagccgcgatcatggccctggcgctggagctgtatttccacatcccgctggccatcgcctatgtgatctgctcgctgctggtgatcccgctggtggcttacggcgtgaccctcatcagccgcctgcaactgtggacgcagcccatctggctagtactgctggtgttgccctatggctttgtgtggtggaaaaaccccgacgccttcagcgactggaccagctttgtcgggcgcagcggcgacggtggcggcttcaacctgctggcgttctgcgccgcctgcacggtggcgttgtcgctggtcacgcaaatcggcgagcaagtggactatttgcgcttcctcccggaaaagaccgccgccaaccgcaagcgctggtgggcggccctgctctgcgccgggccgggctggatcatccccggtgcgttgaaaatgtttgccggggcgttcctggcctttctcgcgttgcaacatgaaatccccatggaacgcgccgccgagccgacccagatgtacctggtcgccttccgctacgtgttcagctcgcccgaatgggccctgggcgcgatggtgctgtttgtgatcatctcgcagatgaagatcaacctgaccaacgcctacgcgggctccctggcctggtcgaacttcttcgcccgcgtcacccacagccatccgggccgtgtggtgtggctggtgttcaacgtggccatcgcgttgatgctgatggagctgggcgtgttcgatgtgatcgaccaggtgctggggctgtacgcgaacatcgcgattgcctggatcggcacactggtggcggacctggtgatcaacaaaccgctggggctgtcgcccaaacacatcgagttcaagcgcgcgcacctctacgacatcaacccggtgggcgtcggctcaatgctgattgcctcgttgctgtcgatcctcgcgcacttcggcctgttcggcgccctggcccaggcggcaccgccgtttgtggcactgggcacagcattgatcatggcgccgttgttggcctggctgacccagggcaagtactacatcgcgcgcaccagcgccgtgcacttgattcacccggtggcgcccgcgacccacgcggtatgcgggctgtgcagcaacccgttcgagaccgcagacatggcgttctgcccggcctacagcacgccgatctgctcgctgtgttgttcgctggacgcgcgttgcggcgatcgctgcaaaccccacgcgcgcctcgtcacgcagttcgaaggcgtactgcgttggctgctgcccaatacgctgatgccacgcctgcacacacgcctggcgcattacctcgggctgttgctcgccctggtgttgatgctcgccggcgccctggcgttaatctacgtgcaggcggcgcaaggcttgccccactccgaaaccctgtatcaggcgttcttcaaggccttcctcaccctctcggtgttggccgccgtgcttgcctggtgggtggtgttgacccgcgaaagccgtggcgtggcccaggaagagtccgaccgccagaccctgctgctgatgcaggaaatcgatgcccacagcctcaccgaccaggccctgcaacaggccaaggaagcctcggaggccgcgaatgccgccaagagccgctatgtcacggggctgtcccatgagctgcgcacgccgctgaacagcatgctcggttttacccagatcctgcagcgtgacagcgccatgcccgagcagcatcaggacgcgctggcgaccatcctgcgcagcggctcgcacctggtgtcgctgatcgacggcttgctcgatgtggccaagatcgaggccggcaagctgcgcctggaactcactgaaatccccttccccgagctgatccacgacctggagcagatgttcaccccgcaggcccgggacaagggcctgcgctttcggctggactgcgtgggcaagattccggcggtggtgcgtggcgatgaaaaacgtgtgcggcagatcctgatcaacctgctgggcaacgcggtgaacttcaccgacagcggcgaggtgtgcctgcgggtcagctaccggcacgaaaccgccaattttgaaattatcgacacgggcatcggcattgacccggcgcagatcgagcagattttccagccattcgaacgcggcgacctgatgcgccaggacaagggcgtcggcctggggctgaccatcacgcgcatgctcaccgccttgatgggcggcgagttgcgggtgaccagcgaactcgacaagggcacctgctttcaggtgcgcttgttcctttcccaagtacgcgcaccgcaagccgtggtgcatgtggagcacgacatcattggttatcagggcgagcgccgccgcatcctcgtcgtcgatgaccacgttgaccatcgcaaggtgctcagcggcatgctcacgccgctggggtttgaagtgatccaggccagcaacggccaggaggcgatccgccaggtggcgctgctggcgcccgacctgatcctgatggacctgtcgatgccaacgctggacggctatgaaaccagccgcctgatccggcgcaatgcgctgtccactgcaccgatcatcgtgatctcggccaacgccttcaccgacgaccgcgaacgcagcattgccgctgcctgcaatgactacctggccaaaccggtgcgcaccccggagctgcttgggcgcctgcaacagcacatgggtttgcagtggttgcggcgcaccaaagcccttgtgccgccgccatcaccccgcgtgttacccagcagcgctgacctcgccgccctcatcgaactcagcgccatcggctacgtacgcggcctgcacgacaaactcgacacgatcctggcacacaccccggacaccgcgcctttcatcaccaaagtgcgcggtttgctcaagggtttccgcctggatgaactcaaccgaaccctcaaggaggccgaagatgaatgcactcacccgcagcactgaacccggcgtggtgctgatcgtcgatgacaccccggacaacctggccatgctctctgacgccctcgacgacgccggttacatggtgctggtggccctcgacggcctcagtgcgctgaaccgcgtgcaacgccggcgcccggacctgatcctgctggacgcaatgatgcccggcctggacggctttgaaacctgccgccggctcaaggcgcagccctcaagcgcggacatcccggtggtgttcatgaccgggctgactgacagcaagcacgtcgtgcaggggtttgaggtgggcggcagcgattacgtgaccaaaccgatccagaccgatgaagtgctggcgcgggtggcggcgcatgtgcgtacgtcgcgtattttgttgtcggcgcgtgaggccagccagcccagtgtgttgacgctggaggatgcgccggcgcaaaggttgctgtcggccaggtttcagctgaccgagcgcgaggttgaagtgttgcgctgggtggcgtgtggcaagaccaaccgggacattggcgatattctggggttgagcccgaggacggtgaacaagcatttggagcatgtgtatgtaaagctcggtgtcgaaacccgcaccgccgcgacctcagttgccctcgccgcaatctgagtatgtgtagagcttgtgtgggagctggcttgctgtggcgagggagcttgctcccgctgggctgcgcagcagccccaagattctgggagcgcttcgcactccagcgggagcaagctccctcgccacagcaagcccacatttgatattcagtgttgataggttacccaccgaaggtctgtgagggtctacgcaacgtcggatcaaacggattgatccgcggcccgatcgccgccgcttcgcgcttcaacaactccaccaccatcggcaaccgcgttggccccagccggtcgctgatggtcgccacactcaacgccgccactgcatgcccgtcgcggttgaggatgggcaccgccaggcccgccatgccttcgagcacgcccgtattgcgcgcggcatagcccagggtgcgcacgttctccacctccgaacgcaacagcacttcgtcatacaggtggaaatccttgagccgtggcaggttgtagcgaatcaccgtctcgcgctcttcttccggcaggaacgccagaatcgccaggctgccctgccccacgcccaacgccacgcgcccgccaatatcgccagtgaaggtgcggatcgggtacgggccttcgctgcggtccaggcagatggcgtcgaacccgctgcgcgccagcaggaacagtgaatcccccaatgacgcactcaggcgcaacatgctcggccgcaccaggtcgcgcaggttgccggtcttacccgcgttggccgccagggcgaagaactccaggctcagccggtagcgtttgctgcgcgcgtcctgctcgaccatgccttcgtccatcaggctgcgcagcaaacggtgagtggtgggctgagacaagccgacttgctgcgcgagttgggtcacacgctcgccgccctccggcacgctacccagcacgcgcagcagcgcgaacagccgggagacaccaccggcaccgacttccttattattttcatttcgatcaatggaatccataacactcattccctacataaattccggtgagtgaataaaactgaaaatactagtccattcagtgaaattccatcttccgcccatcctagtcttcgtcctaatctgcgtccacaggggcgaaatgaacaactaacggcagccgactcaagatcgagcgccaacgcaccggcaagacctcattcgcatctgcccaaaacaaaaaagcgcgtttcgacgcgactcaaaaaaggtggaacgcacacatggcttttctccaactcaacgccttgagcaaacgctacggcgccgtcgatgcggtggtcgccactgaccttgcggtggaaaaaggcgaattcgtttccttgctcggcccttcgggctgcggcaagaccaccaccttgcaaatgatcgccggctttgttgaggtcagcggcgggcagattctgctcgacggccgcgacatcacccacgccaaacccgctagccgtggcttgggcgtggtgttccagagctacgcgctgttcccgcacatgaccgtacgcgacaacgtcgccttcggcctgaagatgcgcaaagtaccggcaggcgagatcgccagcaaagtcaaaaccgtccttgaactggtgcgcctggccccgcacgccgaccgctacccgcgcgaactgtccggcggccagcgccagcgcgtggccctggcccgcgcgctggtgatcgaaccgccggtgctgctgctggatgagccactgtccaacctcgacgccaatttgcgcgaagagatgcagtttgaaatccgccgcattcagtgcgccgtgggcatcaccaccttgatggtcacccacgaccaggccgaagccctgtccatcagcgaccgcgtggtggtgatgcaggccgggcgcgtgacccagatcgacgcgccatacaagctctacgaacacccgcgtacacggttcatctctgacttcgtgggcaaggccaatctgctgcccggtgattacgaccaattgggcatcccgcaagtacgccatgaagcgggcaacggcgaactgaccctgagcctgcgcccggaaaaaatccagctggtggacgcaggcgctggtcgcctgcaaggcaaggttctcgacagctactttttcggcagccaatggctgtatcgcatccacacccgcctcggcgaaatcaccgtggtgcgcagcaacgacggcagcgcaccgctggcctgcggcgcccttgtgggcctggactggcacgccgacctgctgcgcgtgctggcggcggatgaggtgcgcgcatgagccggggctacctactctcgctgccggcgctggtgttgttcagcgggctgctgatactgccgctgctcatgaccctggtgctgtcgttcaacgtgttcgactaccaggtgggcgtgaaggccgatgagtggaccttcgcccattacctgtcactgttcagtgattcctacttctacgagatcttctggcgcaccttctggatcagcgccctggtgacgttgttgtgcgtggtgatcggcgtgccggaggcctacatcctcagccggatgggcacgccatggcgctcgatttttctgatcctgatcctcacgccgctgctgatttcagtggtggtgcgcgccttcggctggagcctgttgctcggtgctgacgggctggtgaaccagttgatccaggcccttggcggtcgcccggtcaagctgttgtacacgccgttcgcggtggtgatcgccctggtgcacgtgatgctgccgttcatgatcattccggtgtggacgtccctgcaaaaactcgacccctcggcggaacaggcagcgctttcattgggtgccagccaggccacggtgatgcgcaagatcgtgttgccgcaggtcatgcccggcgtgttgtccggcaccttgattgtgtttggcctcgcggccagctcgtttgccatccccggcttgctcggcgggcgccgcctgaaaatggtcgccaccgtggtgtacgaccagtacctctcggaactcaactggcccatgggcgcgaccatcgcggtggtgctgctgttggtcaatttgctgatcatgctgagctggaaccgcatggtcgaaagccgctacaaaaagtccctgggggtttaagcacatgtccagaaacggtcctttggccctcggctttcacggtttggtggtgctgttcatgatggcgccgctggtggtggtgtgcctggtggccttcactccggaaaacaccttgagcattccaacgtcgggcttctccctgcgctggtttcgcgcggtgttcgagcgcgctgactttatccaggcgttctataacagcctgatcctggcgtttaccgccgccagcctggccaccttgatcgccgtgccggcagctctggcgatcagccgttatcagttcccggggcgcaactttttcagtgcgctgttcctgtcaccgatcatcatcccgcacctggtgctgggcgtggcgatgctgcgcctgttcgcgctgatgggtgtcaacggcagctttacctggctgatgctggcgcacgtggtgatcatcaccccgtatgtgctgcgcctggtgctggcggcggccatcggcattgaccgcagcgcggagcaagccgccgaatccctcggtgccagccgctttacgctgtttcgccagatcaccctgccgatgatcctgccgggtgtggcgggcggctggttgctggcgtttatcaacagtttcgacgaagtgacgctgtcgatcttcgtcagctcgccggccacgcagaccctgccggtgcgcatgtatgtctacgccaccgagtccatcgacccgatgatggcggcggtgtcggcgctggtgatcgcgctgaccgccgcgaccatgattctgctcgaccgggtctatggcctggaccgcgtgctagtggggaaacattgatggctctgttcaaacgcctggccgaaaccgggcgccctgccgtggccttcaccctggacggtcaacccgccagcggcttgctcggcgacaccctgctgaccgccgtgctgacctgcgccgaacacctgcgcggcagcgatttcagcgccgaacgccgcgccgggttctgtttgatgggcgcctgtcaggattgctgggtacggctggcagacgggcgccgcgtgcgcgcctgttcgacactgttggaagaaggccaggcggttagccgtgacccggggcgccagccatgaagcccatcgtgattgtgggcgcaggcccggcgggcatcagcgcggcacgcaccctgctcgaccatggcgtcaaagcctgtctggtggatgaaagcctgcgcggcggcgggcagatttaccgccgtcagccggtgggtttccaacgcagcgccaaacaaatttatggcttcgaagcgagcaaggccgaggcggtgcatcgcacgatggacgaactggcgcccttgatcgactatcggccgcaaaccctggtgtggaacgccgaggatggccgcctcgacctgctcgacaacggccgggccgagagcatcgagtactcaacagtcatcgtcgccaccggcgccactgaccgcattttgccggtgccgggctggaccttgccgggtgtctacagcctcggcgcggcgcagatcgccttgaagtatcagggctgcgccattggtgagcgcgtggcgttttgtggcagcgggccgttgctgtatctggtggcgtatcaatatgccaaggctggcgccaaggtggtcgcggtgctcgacagtgcgccgttgcgcgcacaatgccgcgcgttgccggcgttgctgcggcaaccggcgaccttggccaagggcgtgtattaccgcgcctggctgacggcccatggggtccccgtgcatcagggcgcgacgcttgagcaaattgacggtgagcaacgggtcaagggtatccgctggggcaagcacacgctggaatgcgatgccgtggccttcgcccacgcgctgcgcagcgaaacgcaactggcggatttgctcggttgcgaattcgcctggaaccccttgaaccgtgcctggctgccgcaacgtgacagcgccggacgcagcagcgtcaagggcgtgtacctggtcggcgacggggctggaatcatgggcgccgatgcggcgcaaatggccggtgaacacgcggcgttagcggtgttggaagataccggggttgccatcgatcatcgccgccgcgctgtgcttgaacagcaattggcaggcatccagcgctttcgccacgggttggaaaccgcgttccccttccccgaacactgggccgcgcaggcaccagatcatttgatcctgtgccgctgcgaagaagtcagcgtgggcgatgtacgcgccgtggtggatgaaggccattgggagatcaaccgggtcaaggcccattgtcgcgtcggcatgggccgttgtcagggccggatgtgcgggctggctgccgccgaaatagtcgctgaacgcagcggtcgcgggattgaacaggtgggccgtctgcgtggccaggcgccgatcaaaccactgccgtttggcgtggaggtgcagccatgatcgacgcgattgtgttgggcggcggaatcgtcggcgcatcggcggccttgatgctcgcgcaaaaaggccagcgtgtggcgctggtcgaacgcgatttttgcggctcgcactccagtggcgtcaactacggtggcgtgcggcgccagggtcggcccttgcatcaattgccgctgtcgcaacgttcccatgagttgtgggccgacttgccgggtttgatcggcatcgatggcgaatacgtgcgctccgggcatttgaaactggcgcgcagtcaggctgacttcgccgcgctgcaggcatatgccgagcacacccgtggctttggcctgggcctgcaactgctggactacgccgaactgcgcgcacgtttcccgtgggtcggcgatatcgcggtcggcgcctcgttgtgccctgaagacggccatgccaacccccgccttgtatcacccgccttcgcccgcgccgcacaacgctgcggtgccagcgtctttgagcaggctgaagtgattcgaatcgaacacgacggccgccagttccaggtgcattgcgccaatggcgtgcagctgcaagcaccgtggctactcaactgtgcgggcgcctgggcgggcactgtcgccgagcaattcggcgagccggtgccgatcacttcggcgcacccggcgatgctggtcaccgaacctttgcccgtggtgatgaacgtgagcaccggcgttgaaggcggcgggatttatgcgcggcaagtcgcccggggtaactgcatcctcggcggcgggcgcggttttgcccttggcccgcggcaagcccgaccgggccaggcagcggtgctggaaatcctgcgcaatgccggcgagctgtacccgtttctcaagggtgcccaggccattcgcacctggagcggcaccgaaggttacctccccgatcatgaaccggtgatcggccccagcagcacccaacccggcctgctccatggtttcggctttgccggcgccggattccagctcggccccgcggtcggtgaagccctggcagagattgtctgcgacggggccagccgccatcccatcgaagcgttttccatccgtcgtttccaagcctgagaggaaaaacatccatgaacacacgtatcgcgctgtcctgcttgtccctcgcgttgctcgcctctaccgcccacgcggcgcccacgctgtacctgggcatgaacggcggcaccatggaacgggtctacgccgacaaggtgctgcccgcgttcgaaaaggccaacaacgtcaaggtagtgatcgtgcccggcacctcgtcggacatcctcgccaaggtccaggccaacaaagacaacccgcagatgcacgtgatgttcctcgacgacggcatcatgtaccgcgccatttccatgggcctgtgcgacaagctcacgccaaatccgacccttgaccagattccggccaaagccaaaatcaaggatgaagccgtggccgtgaccctcggcgtcacgggcctgggctataacgccaagatgttcaaggaaaaaggctgggcggcaccgacctcgtggatggacctggccgacccgcgcttcaaggacaaggtggtgttccagtccctggcctcctccaccttcggcctgcacggtttcctgatgttcaaccgtatccagggcggctccgaaacagacgtggagccgggcttcaaggcctggccgaaaaccatcggccccaacgtactggaatacatcgccagctccgcgaagatctccgagatggtgcaaaccgacgaagctgccatctttccgctcacaccgacccaagtcaccacgcaaaaactgctgggcattccgatggaatacgcgcaacccaaggaaggcgcggtggtgctgaacgtggctgaatgcgtgatcgcacgcaatgaccagccggaactggcgcagaaacttgcagccttcctgttgaccgccgaagcccaggcgcccgcgctggaggaaggcgaccagatcccgtcaaacccgaccacgccaaccaccgacaagacccgcgcacgggttgaggcgatgcagggttacttgcagacggcgatttcgattgactgggaccaggtgaaccaggcgcggccggagtggaatgcgcggtggagccggtcgatcgaacgttaatcaatcaggaacaacgggcagcgcacgcttgtgcgctgtcgtgctgtaagccccctcgacaatcgccctcacccgctcagtgaccggctcacccatcaggtaggcatcgatctcctcatagctgcaaccataagcctgctcatccgccttgcccggtgccagctcttcaaggtcggcggtgggcagtttgtgcaccagtcgggccggtgcgccgagggcagtcgccaacagtcgaacctgagttttggtcaggcccgacagcggtgccacgtcgcaggcgccgtcgccgaacttggtgaagaagcccatcaacgcctcggcaccgtggtcggtgccgatgaccaggccgttgtgcagattggccacggcgtattgcgcgatcatccgcgcgcgggccttgacgttgcctttaatgaaatcgatctgctctgcactggctgagtcagccgacaggctggacatcaggccgtcgacgctggcggcaatgttcagcgtttcaatgtggtccggggcgatgaaatccagggaggcctgggcatcgctttcgtcagcctggcttttatagggcaggcgcatggcgataaagcgcgcggcggagccttcattgcgcagttgctcaaccgccaactggcacaggcggcccgccgtcagggagtccaccccaccactgatacccagcaccaacgccttgcagccggactgacgcagggtgtgtttgatgaagtcgacacgccgttgaatttctccggcttcgccccctttgaccagttgccgattgatgttcagtgcctgcgcgatacggtcttgcatgtcacacctccacattgccaacatcgaacactttcgccgcgtactgcaaaaacgacggatcttcacagacgttcttgaccgggtcatcggagaacttcaccaccggctcgccgtgcacccgcaccagtttcatcacgatgctcagcggttccaccccttccacatcgcaggccaggctggtgcccatgccgaaaccgaatttggccttgccacgcacgtgacgcaggatcggcaggcatttttcgaagttcaggccgtcggagaacatcaggtccttggtcatcgggtccacccccagttgctggtagcgcgccagcactttatcggcctaaacgatggggtcgccggagtcctggcgcaggccgtcgtagagcttggcgaagtacaggtcgaaatccttgaggaaaaagtcggtgctgatgcagtcggtcagggcgatgcccaggcgcccacggtattcacgcacccagttttccagcgcggcgttctggctttcgcgcaggcggcccagttgctggtgcaccatcaaccattggtgggccatggtgccgatcaacggcaggtcgaattcgtaggccaggtgcgcgttgctggtgccgacgaactggccgggaaagtcgcggcgcatgatgtcgatcacttcgcgctgggccttgaacgacaggcgccggcgggtggaaaaatcggaaacgcgcaggtcggccagttcttcgcggctgaggtttttctcaagccagtcgaacttctggtagagcttgcgggtgacatcttccagggttacatcagggtatttgtcgcggttgcgcaactcgctgaccagggccagcaccggctgctcgaacatgatgcaatgcagcatcgggccgactacacggatgttcagctggccgtcgatttcgctgacgtggatatagcgcaggttgaagcggaacaggccgaggaagcgctcgtagtccggggtcaggtattcacgaaagcgtgggttgaacagaaagcgcaactcgccttcacgcatgtgcaagccggcaagcttttccagttcatcccgcagcggcgggatcaggtggccgagcttttcctttgaccgcacgatgaagttgtattccacgtccacgttcgggtgctggtgcaacacggcttgcatcatggtgaaggtgtagtagtcggtgtcgagcaagccctggatgaccggggcttcgtagtcataggcactttccatacggtggctccttaacgcgcagccagtgcggccagttcttcgcgggtgctgctgatgacggcaccggcctcgagtaacgcgttgaccgccttcacgccgccctccggggtgatgccgcggcaggccggcaggtgcagaacgacttccagcccggccctgagcagttgcaaggcggtggtcttgacgcagtaatccagcgccaggccgccgacaatcacccgggttacgccttgggccttcaggtactcgatgacgccggtggacagcttgtcgtgcaggtcgtggtagcaggcgccgtaagggtgcaggtcgggttcgacgcctttccagatgaaataatcgtagtcatacggcgccggcaattcgtccagcaaggtaaaaccttcggtgcccggcacacagtggctgacccaggtgatatcggcatgcgccaaaccggtgggccggtacatgtcgctgcgttcggtgaccacccagggcgcctgcggggtatgcgcgtctttgctgccgacgcggtgcccggccaggctggccatgtagttgagttcggcgccgatctggtcaccaccggccacaggcagttcatcggggcacagtggcgtgaagctcttctgtgggtcgacgtcgaaggaagcgatggcagttttcgaaagggtcatggtggttctcctgtggcctgaaaacaaaagtacacgtcatgtactttcattgcaagaaacatttggttatctatcctgatgccagtacatgacatatctgttcgatccgttagactgtgcctcgccactgttcataaggacctcacatgccactcagcgcctacctgcacactgttgacctgtgcgtgctgttctactgccgcgactcgggggaattaaagctgctgttgaacaaacgtgatgccgaaccctttgccgggcattgggcgctgccgggcgtggtggtcaatggcggcgtgcaagatctgagcctcaaggatgcggtggagcgcttgcgggcgagtgacaaggtggggctggcgctggcatggagcgagcaagtcggcacggtgggtgatgcgtttcgcgatccgcgctgctggtcgtcgtccacctactacctggcgatcgtggcagacgaggtgaagctcggcgagcatcaggcctggtattcactgaaggcggtagcggatggcagcatcaagttgccgtttgatcacaacctgatcgtggcgtcggtgctggaacggctgctgtccaagtcgctgtacagcaacctgccgctgatgtttctgggggatgaattcagcgcgccgcaagcgaccacgattttttccctggtgctggcgcggccggttttgaagaccagcattcgccagcgcttgctgaagctgaccgaggcgggatatttgcgcgagacggggcgcaagaagcacggcgaggggggcaggccccaggcgacggtgcagaacctgaagcctggagatatttacttcttcgaccgcagttttgctgactgaccttttctcaccaacaatgaaattcaaaggtgggagctggcttgcctgcgatagcatcaccgcggtgcaactaacctaccgaggcgcctgcatcgcaggcaagccagctcccacacaagccagcccccacagtagatcgcctttaactgaacaggctcagttcatccagttgccgccatccacgttataggtctgggccaccacgtaatcggcgtccttggaggccaggaacaccgccatcccggtcaagtcctcggcggtgcccatacgcccgaacggcacctcggcccctacccgcttcttcttctcgccgggcgccagcccttcgtgtttggcgaacatcgcatccaccccatcccagtgctcaccgtccaccacacccggcgcaatcgcattgacgttgataccctgcttgatcaggttcaaccccgccgactgcgtaaggctgatcaccgcagccttggtcgcgcagtagatcgccaccaacggttcgccacggcgcccggcctggctggccatgttgatgatcttgccgccatggccctggcggatcatctgccgtgccgctgcctgcaaggtgaacaacgtgccggcgacgttgatcgagaacagccggtcaaagctgtcgcgggtgatgtcgacgatgggcgccagatcgaacagcgccgcgttgttgatcaaaatatccagcttgccggcctgggccaccacagcggcaattgcaccgtcgatggaggcttggtccgtgacgtccattgccaccgcgtaagcctgtgggcccaactccgcagcggtggcctgggcgcgttgcaggttgatatcggcgatggcaaccgtcgcgccttcagcgatataagcctgggcgaaggcgcggccgatcccgcgcgccgatccggtgatcagcgcgcttttaccttccagtcgtttcatggggagtcctgtcagcgttatttagggtagccggcgcgtttcatctcgcgctcggtggtggactgggcttcaagcagcgcctggtcaaccgtcatgccgccggtcaacgccgccgaaaacagcttgccgaccgaggtgccgatggcctggaattcggggatagtcacgtactggatgcccacgtacggcaccggtttggcggacgggtgcgcggggtcggcgtgcttcatcatttccagggtgacttgggcaaacggcgcggctttcaggtaagcctcgttgtaagtggactggcgggtacctggcggtacgttggtgatgccttctttatcggccaccagctggatgtagtccttggacgtggcccaggtaataaaggctttggcggcgtccttgtgcttggacgtggccgggattgccagggaccaggcgtacagccacgaggagcccttgtcggtgacttcggtcggggcggcggcaaaccctacgctgtcggccaccttgctctggctcttgtcagtggtgaatgagccggccacgctggcatcgacccacatcgcgcacttgccgctgttgaacagcgccagggtttcgttgaagccgttgctggacacgcccggcgggccgtattttttcagggtattgacgtagaagttggcggccgccgtccactccgggctggtcagctcaggcttccattgctcatcgaaccagcgcgcgccaaaggcgttggccatggtgctcagcagcgcgatgttctcaccccaaccggccttgccacgcaggcacaggccgtattggtctttgtctttgacggtgagcttggaggcgaactcgccgagctgggtccaggtcgggtgcgcgggcatgctcaagccggcctgtttgaacaggtcggtgcggtagtaggtcaccgtgctctcgccgtagaacggcaaggcatagagcgtgttattgaccgacaagccctggcgcaccgaggggaagatgtcgtcggcatcgtaattggccggcagttgggtcaacggctccagccagtgcttggcgccccacagcggggtttcgtaggtgccgatggtcagcacgtcaaactgtccgccctgggtggcaatatcggtggtgaggcgttggcgcagcacgttttcttcgagcaccacccaattgagcttgatgtccggatgctgttcttcgaacaccttggacaggcgctgcatgcggatcatgtcgctgttgttgaccgtggcgatggtcacggtgtcggcggcatggctaggcatggccagtgccaggccggacagcaggaacagcgcttgcgggagcttgcctttgcagatcgggagcatggcggtttccacctgttgtttttgttgttgagcgccgattacagcagctctgccaccccctcacaaacgaatggtgaatcctcggctgatacttttttaacctgaggcccgcgatcaaaaaagtatcagtgccgggcgaaaccgggggtagcgccgacacgccgcaggcgcgtattttgaggtgattccaagtacaacaaagaagcctcgccatgcctgtcagccgcgccaagctgttcgagcaccgccctgccgaactcgaagtcatcctgccggagccggaccattgctttcgctggttcgagcacgattacccctacgacctggcgcgctggaaccaccatcccgaatttgaaatccacctgatccgccagggcagcggcaagttggtggcgggcgactatatcggcgccttttgtgccgggcatgtcgccttgatcggcccggacctgccccacgactggatcggcgacctggcccccggcgagtacctgaccgggcgcgatgtggtcctgcaattcgacggcgccgccctgctcgccctgcgagagacgctgccggagctgggcgacttgcagcagttgttcgacaacgcgcggcgcggcctggcgttcagcggcgacacggccgtgcaagcggcccacttgatggaagccatcggcagcgcccacggcctgcaacggctgattctgttcctgcaactgctcgatacgcttaaaaatgccccgccccagcacacccaggctttggccagcccctgctacgcccccacactggacccgcgcagcgccgaacgcatcaacaaggccttcgactacctgatgcgtgaactgaccggtgacttgcgcctgtcggtcatcgctcggcaactggacatgagcgagcccggcttctcacgctttttcaaacgcaacaccgggcacggtttcatcgacctgatgcgcaagtttcgcgtgcagcgcgcctgccgcctgctgctgcaaagtgatatgtcggtggcggatatctgctttgaagtgggctacgccaacctgtccaacttcaaccggcattttcggatcgagatgaaccagacgcccagcgaataccggcgcgaaaccgcgatgcatctgttcaaccgcatcgaaaaaatgacacccagccaattttgactaaaaggtcgactaatcccgatttttttcaggctgatcaaccctttgaacaaagttggtacaacctgtgcaaacgtttgcggaacgaacttggcaaccaggttcacccttacccgaagaatcgggttcaaaccgcgtacgaatagggattttcaatgcaccccacctcaaggcgttcggcctgctttggtgtttccttgctactggccaccgttacgggagtactcagtgcccccattttggcgcaggaacaccccgtcgatgactcagcacagggcgaaactctaagccctgaaaccaagagccctgaagcgagcccggccaaaaaaggtgcatacctgtcggactggttcaaccaggacctgacattgatcggcagcaaagacatcagcttcggccccaaaccgcaggatgacgtgtacctggagtacgagtacttcggccgcaaaggcccgtttgaactgtacggctacatcgacgtaccgaagatcctcggcatcggtaacagtaatgacaaaggcgcgtgggaccatggctcgccggtgttcatggagcacgagccgcgcatttccatcgactacctggccgggcgcagcctggcaatcgggccgttcaaggaatggtacgtggcgtttgactggatctacgaccacggcagcaacaaatcgaaccgcgccaacaccttgtacagcggcctgggcaccgacatcgacacgcactcacgggtcaacctgtcggccaacttctacgggcgctaccagtgggaaaactacggcgcaagcaatgaatactcgtgggatggataccgcgcgcaaatgaagtacatcgtgccgatcaccggttttgagaacggcgcttcgctgacctacatcggcttcaccaaccacgacttcggttcaagcctgcacaaggacaacccggcgcgtacggccaactccaccgtggccaccaacgtgctgctgtattcgttcacgcacctgcgcttcaccctggtcggccgttactttcataacggcggcaactgggaggatggcagcgagttgaattttggcgagggcaacttccgcgcccgctcggatggctggggttactacgccggcgtgggttaccaattctgatagaggagctttagatgaacacattcactcgactctcgatggccgtgggcctggcgttgctgccgcatgtggtgttggccgacagcgcgccgatcaaacccaaagtcatgctgatcaccatgttcgcccccgaggcgcaaacctggatcgaccgcctggaactcaagcaggaagtgcgcgtgccgggcttgtctgccgactacccggtgatccgctgcaacacccaggacgtgtgcctgctggtcaccggcatgggccagaccaacgcggccgcgtccaccctggcactggccttgtcgcccaaattcgacttgcgccagagctatttcctgatcgccgggatcgccggtatcagcccgaaacatgggaccatcggcactgccgcctgggcgcattacctggtggaattcggcacccagtgggagctcgattcgcgcgacgcccctaaagactggccaaccggctacatcggcatcaacaccaaagggccgaacgaaaaaccaccgctggactacaaaaccgaagtcttcgagctgaacccgaagctgcaagccaaggcatttgccctgtcgcaaaaggtcgagctgacggaaagcaaggaatcggcagcgtggcgcaaacactacccggccgcaccggccaaccaaccgccgcaagtcacccgttgcgacaccctggcgggcaacacctggttctccggcacgcgcctgagcgaacgcgccgaagtctggaccaagctgctgactgacaacaaaggcgaatattgcaccacccaacaggaggacaactccacctacgaagccttgctgcgcgcgagtcgtgaaggattggtggatatccagcgcctggccgtggtgcgcgccggttccgattttgaccgcccttaccccggctacagcgaagtggacaacttgctgaaatacgccgaccagggcggttttgtaccggcgctggagaacctgtaccgcaccggtaatccgctggtacaggcgatcctgaaaaactggtcggcgtgggaaaaaggcgttccagaagcgtaatgaagttcgaatgtgggagctggcttgcctgcgatagcagtctgtcagccagtgagttgttactggcccaccgctatcgcaggcaagccagctcccacatttttatcaccgtgttaaggcaggaagatgatcttgtccgcgctgccgctgttcacttcctcgtaacactgcacgccatcagccaatgcgacttcgcgcagccctgtcggcagcggcagcaaatcttcatcaaaaaaccgcccgaattgctccagcatcaccgcgcactgctcgcagttgtagagcaacgaattgatgccgaccaccgaaccacccttacggtacagggccagggctggcagttgcacatgaccgtcaaccggcgccgcaatgatggcgatgcggccaaacggagccaaagccgcaaccgccgctggcagccagaaaccggtcgtatcaaagattacatccgccccgcccttgaacaccgcattcacctgcgcacccaatgcctccggctggcccaaggcgatggcatcaaaaccttgtgctttgagcacttcaacctgatccgccttgcgcaccgcccccagcacctcggcaccgcgaatcttcgccagcgccagcgccgcactgcccaccgcaccgtttgcaccgatcaccagcaagcgtgtgcctttgccgacaccgctgcgctccagcgcatcccaggcggtggtgtacggcacgccgaggctggcggcctgggtgaaactcaggtgagtaggcttgtgcgccacccccttggccgacacggtgagaaattgcgcgtgggaaccgtcggcaaaaaaaccgaggtcgcgcccggtgccccagacctcctggccgaccagctcttgcgggccgtccaccaccaccccggcaaaatcacgtccgggaatgcgcggcagcgtggtgtaggggaaacgaccgagcacgtttttcacatcgctggggttcaggcccgcggctttgatctgtaccagcacttcaccggccgccggtacgggcgtggcaacgtctgtgaagctcaaggaagcgaggtcgccggtggcggaaaattgcagtgctttcatggcagatatccatcgaagggaaaagagatcaggacaaccaaccgctgaccagctgccggcccatgggccacagctgttcgcccagcaacatgcccatcaggccgaccagtgcgatggcgggtggcgcgggcgagcggaagtccaaggcaccgtagatcacgccgacaaacaggccgatggcgagggaaatcaggtaattcatggtgggtggcgccttgtgggttgatgggctcagtgtagagagcccattgctgaagcatcggccaaaggcttcaggatttcggccaacccgtcagccgacgtactgcgagggggccacacccagttcccggcggaacatgtcgctgaagctgctcggcgaatagcccagcgaccgcgcgataccgctcaccgactggccctgaatcaactccgccaccgccgtggccagttgcacctggcggcgccattcggcgaagcccatgcccagatggttctggaacagccgcgccagggtgcgcacactggcaccggcgaattcggcgtgttgctcgaatgggatctccagggacggagcggccatgaccgcctgacaggcgttgatcaagcggcggtcagcctccagcggcatggcgatgcgaatctgcgagcggcgcgcccgttgcaactccagtaaagccaagccaaccacagcgtcgtaataggccgagtcgccgttatcaccctgatcgaccaaggtaatgatcagctcgcgcaacagggcgccgacctcaatcacctgtacctgagtgtccagcgttgccgccagcgccgggcgcaggtagatattgcgcatctgcaaatccgagaccacacgaatgccgtgctccacacccggtggcagccacacggcgcgttgcggaggcaccaccaacgcttcgcggggcgtctcgacccacatcacaccgctcatggcatacagcaattggccccaatcatggctgtggggttcgatgtacagcccacgcggatacgtacgcgccaggggttgcacgggaacggcgtgatcactgaggtcggggggcgcggccagggccatgaagaacacatcaataagggtgagcggccatggtaatgaccgccacccgacaaaccgagggattttttgcgttttcagccgtgggcagatttggtgcactcgcagcccgtcgccgaagcgcaaggctcgccatgggcatggtgctcggcgcagcccttgcagcaatagcccttaccgtccttcatcaccgcatctttgcccagcacgcacttgcagtgggggcaggcacaggttttatcagccatggtcagactcctttttcatggtcgtccaggtgcggcgggcgccgtaccttaagaggtgactatagaagaggatccggggttcacttcgtttcatcggccaagcggctattgctgcggtacatgaacaccagcgccagggccagcaacagcatcgccacgatgcggctgcccgacaactcaatggccgggttgcccagccagccgaagttgtcgatcaacatgcccatgcccaattgcccgacgatcaccgccaccgtcgccaccgccgtgccgaccaccggcaccgcgccgaccatgaccatcatgtagaccaccccgaacagtgcgccggtcagttgccatttcggcacgtccaacaggctgacagcctgagcgggttcgaagaaaaaaattagcagtgcagtggtgatcgcgccaactgcaaacgtcagcaagctgctgcgcaacacccccactgactgacccaggcgcccgttgatcgcagcctgcacactcaacaccgcaccggcggcaatcaccaacaccaataacaaaatcagattcatcgccttaccctctagcaatcagaacaagtgccgccacgatcaacgccagggctatccagcgttcgccattgacccgctttctggcggtgccgaaccagccgaaatggtcgatcagcacgctcttgcccacttggcccgacaggatcgcgatcatcgtcatggcaaccccgatatgcggcgtggccagggtcagcaccaccacgtacatcggccccaggaagccgccgatcagttgccagcggggcaagtcagtcagcgccgggccctgctgcgggccgctgaacaacaacagtaaaaacaggatggccgtgcccacgccgaaaatactcaaggtcgcccacaaatggcccacctgcacacccaacggcccgagcaagcctgcttcgaccgacaggcccatgcccgccaggatcaccagtggcagcaacaacaaacggagtaggtttttctttggcgtggcctgcgccactgcctcggtagaacttgcctgcatacatcacccgcacgtctagaaaggaaacatggcgcgcattatccggtggccgccttgtgcgataaatgggagcatacggataacacctttgcgcaatacgcacagcatggagccagaatgcagggtttgaatgaactgagtttcaaggcgttgcgcctgttcgttgccgtgctcgaccatggcagtttttctgaagtggctcgccgtgaaggcttggcgccctcctccatctcgcggcagatccagttgatggaacaggcgctcggccaacagttgctctaccgccacacccgcgcggtcagccccaccgaggccgggcgcctgctcgggcatcacgcccgcttgatgctggagcaactggaaagcgccagccaggccttgcaggaacaggaagccgagcccagcggcctggtacgcatcaatgcgccgatggtgtttggccagcgccacctctcaccctggctgggtgagttgtgccgacgctatccgaaattgcagttggatatccagcagaccgacacctacgtcgacccgctgcaagacggcactgacttgctgtttcgcatcggcgtgctcaacgattccggcatgcaggcgcgcattttcgcaccccagcgctttcgcctcgccgccagccccgcctacctcgcgcaacatggaacgcccaggcacccggacgaactggctaaccatcagtgcctggcctacaaaggcatcaccggccagcagcgttggttctttcgccgagatggcggcgagtggacgccctacagcgtcaagggccccatcaccggcaaccacgccgacaccctcacccacgccgccgagcagggcctggggctggtggtatttccgtcctggctgatcggcgagggactgcgcgcggggaccttgcaggcggtgctgacggaatacgaggtggcgacaacgctggagcctcagcaaatagcggctttgtggccgggaagccggcggttgtcgctgaaggtgcgcacggtgattgattattttgtggagtgtttcgggacggtgccgtattgggacaggtaagcggttttgctcaagtcgagaggctcttgcgaggaattttcctcgttgaggaagtaggctcattctgatttcactggccaccattcctgacgacagcctgtagcgtgcagactttggcgaaatcctttttggagagatgccatgactgtcatttaccacaagccatcacgcgccgaacgagccgctttaaccagcagtcgggccatttttgatagctcgcgcagccttggctatatttggccaaaacagggggacaacccaatgattgtcgtgccgctgggtgaagctaaaaataacctttcaaaactggttgatgaggctgcgtccggcaaaatcatcaccatcgccaaacacgggcgtgcaatggcccaactcgtaccggtggggaaaaccaccgggcggcggatcggtgccctgaaaggacaactcgacatccccgaagactttgatgcgcccctgcctgacgatctgctggacgcgtttgagggcagtcattcatgagagtgctgctggatactcatattctgttgtgggcattgaatgatgatcccaggctatccagcaaagcccgaaaactgattgaaaatgctgcaccacaaggacccttttgtccggctgatcgttgccgcagccatcagcgagccgatgaagcttttgacggctgacccccaggttgctggctacacacccttggcattactggtttagatcagcctctgaactcaaaacaaaaactgcccgatcaaccaggcattcgccccactgatcaccgcgaataaaaaccacgccagcaagcgcgtcggcagccggttaacgaaaggccccatcaactgcttgtcgtcggtcatgcggatcagcgggtacagcgcaaacggcaactgcaggctgagcaccacctggctgagaatcagcagtttgccgatggcatcgtcgcccatcagccacacgccgagaaacgcagggatcagcgccagcccacgggtgatcaggcgccgctgccagcaaggaatacgcaggttgaggtaaccctccatgatcacttggccagcgatggtgccggtgaaggtcgaactctgcccggaggccagcaaggcgatgccgaacaggatgctggcaaaagcgccgcccaccagggggtcgagcaggtggtaggcgtcctgaatctcgaccacttccgtatggccggttttgtagaatgcagcagcggcgagtaccagaatcgccgcattgaccagcaaagccagggccagggagccgatggtatcgatacgcgccagcttgactgcgtcctgcttgctggcgaggtctttgccgatgaggcgggtttgtactatcgaggtgtgcaagtaaaggttatggggcatcaccgtggcgcccagaatgccgatggccaggtacagcggcgcggcgtcgctgatagccgacagagacggggtgaaaccgctgaacacgtccggccagtaaggcttgatcagcaccagttcgatgaagaaacacacgccgatggtcgccaccagcgccagcatgatcgcttcgaggcggcggaaccctcggttttgcaaggccaggatcaacagcgtgtcaaacgcagtaatgacgatgccggtggtcagcgacacgccgagcaacaggtgaaacgccaacgcgcagccgagcacttcggcaaggtcggtggcgatgatggagatttccgccagtacccattgtgtgcgggcggaacgcttgctgtagcgctcgcggcacagttgcgccaggtccttgccggtggcgataccgagccgcgagcacaggcactgcaccgccatgcctgccaggctggccagcaacacgacgaacaacaggctgtagccgtagcgcgaccccgcctcaatggccgtggcccagttgcccgggtccatgtagccgatagagaccagcaggccggggccggcgaacatcagtgcacgcttgaagaacgaagccttggggtcaacgatcacggagccggccacttccggcgggcagaacggggcggtggcgattttcggcaggctgaatttcacgcggtatcccaggcaaacacacaataatgacgggagcttatcagtcggacgcgaccgtgcgcatcaccgtttcccgaggcaagtcaaaggtttcgaccacttgcaccaccaggtctatctcctggttcagcgcctcgcgctccatgcgctggcgaatcaggccgaccaccaacaccgccagggtagtaatcgaataggccgggccggaaaacgcccgcacaccggtgaccagcaacatcgccgccgccagcgcctggccaaccaccggaatggccgtggcggcaccacggcgcagcataaacccggtgagccccgccagcgccgtgccgctcaacgcggcggttgccgaccggccaacgtcgatgcgattgaacaggccctgttccttttgtgccgccgccttgagctccgcgtcgaaggctttgcggtcggcgctgctgagcttgtcccggtactgctcgatcagtttttctgcgacctgcgcctcgatgtccgccaacgctacggtcgcaacgggctcatcgaacttgatccccagccgctgcgccacgtcttcgacgatctggcgatagctcacgccatggccgcgggccaggttcatgaagctgtccccgcccatgcgctgcagttcgattgccagcttcagcggttcacgtacgccggcatcgattgaagcgctgcgcttttgcgccatcaactcggccaggaatttcagctcgtccggccgcgcttgaacgagtgccggaaacaaatccacgtcttcttcggcaaaacgcacttcggtactgcgttggtcaaaacgaatcatgccgcgccgctcctgcaacaggtcggtgtactgcaccaccgtcttcagttgcggccaatacgcggcgtgatcgaaggtcgccagttgcacggtcgtaactttgcccttgagcgcaggcgtgagcgggatcgcataacggccaatgcaacgctcggcgtccggcttcatcgccagcgcccagtccttgctggaatagcagttgatcacccgccccttcagtggcgccgacacttcatcccaagggcacgacgtacagatcgccccgcccatcagcagcaaattgttcaacggcagctcgcgggcgacctcaggattggccaacacgcttttgaccagaatgcgcgcccccagggaatggccgatcaagttgatacgccgtaccggcagcgattcggcgtgcaggtaattggccaattcaggcaacaaggaccgggccacttcatcaacgcgcgcctcgacacttttgtagtggtcgagaaaataggcaatcgccttgcccacgcccacggtcgcagcgcccaggccgccaccgccaagcattgaggcgatcacctccttgaacggtgcaaacaggttttccagaaaatgcccggccggccagaacaacatcaggttggtcgagccttcgatgctcgccagttgttccttgaagttgcccagttgctgacggttgaagaacgcggagtaaccgtgaacgtagagattgagcacatccccctggggctcgccgcacaacaagaacgtgggctggcgggtgcggtgcatttcatcccactggtgctgcatgggccggtgactcctggtgacgacggacggcgatagtaacaaagcatgaaccgaagaacggtgaatcctgacaggcgtggatcagaacagtgagccggccctggacttggctaaatagcgcgccggggaatcgcccaggttgcggcgaaacaccgcggtgaaagcgctggagctgctgaaccccagtgcgagcgccacgtcggtaatggacacaccgtggctcagccgcgccgtcgcctccagcaaacacacctgctggcgccaggcgacaaaggtcatgccggtgttttcatgaaaatggcgggtgaacgtgcgccgactcatgttcgcccattcagccatttcatcaagggaaaccgactgtgtgggcgcctccagaaagcgctggcaggcccgcgccaggcgcggctcggtgggcaacggggcactgaggggcagctcgggcatggcgccgatttcgtcgaccaataacgccagcacgctgcgctgccgaacacccggggccgccgacggctcgagggtcagcgccgcttccagtagatgcctgagcaagggcgacacttcaaacacctggcagcgggcctgcaaaccggcacgcctggcagcgccgtcgtcaaggtaggtgttgagcatgacgacatcgccacgcatgtgcatttcgtggggcacgccgccgggtacccagatcgccctttgtggtggcaccacccagttgccgaggtcggtgaacattttgagcgcgccagtggaggcgtacgcgaactggccgcgcgggtgggtatgccgttcgaacacagtgccggacggatattcgcgcaacgtgaccacggcttcggggtcattggcatcaaaggtctgaatcatggcccgatagtgtcaaattttggccttacatagcaagcgggccaagccgtggccccctagcattgacgcccttgaactcgctctggaacgcccatgcgcaagaaacacctcgcccttgtcctcctcgtcacgttggtctggggccttaactttcctgtcaccaaactcgggttgcgctcgattgacccgtttgtgctgacgggcattcgctttgccctcgccgccttgccctgggtgtttgtcatcaggcgcccggccgtcaggttccgttatgtggctgcttacggcgtgatcttcgggctgggcatgtggggcgtgatcaactatggcattcagctcggggtaagccccggcatcgcctcgctgatcattcaactcagcgtgtttttcaccctgggttggggttacgtgctgttcaaggagaaaatccgtcgtgcgcaatggatcggcgcgctcttcgcgctggcgggtctggcaggcatcatcgtcacccagcaaggcgacgctgcagtgctgggcgttttgatgatcgtgttgagcgccctggcctggagcatcggcaatgtcatcatcaaggcatcgggggtgaaggaaatcttttcgttcatggtctgggccagcctgtttccacccgttccgttgttcctcatggcctggtggctgcacggcagcagcgcctttgaaggcttgtccgccagccttgatctcaccgccgtgctgtcgatcctgtttcaggtttatctggccacacattttgcgtactggggctggaactcactgctcaaggcgtacccggtttcaaccgtggcaccgttgtcgctgctgattccggtattcgggattgccagctcgatgttgatattgggcgaacgcattgccgtgccccagcggctgttcattgccgtcatcattatcggccttgccgtggggctgtaccgaaagcgcgattgtgcaagtgcatagatagacttggcataaattcgggattttgttcgcgtaactgctcaattagcctttgtcgggtcttgaaccgaaccgaggaaacaccatgagcactcctgaatttttcgtcacgccaggctatggcgattacatgcgcgaacacctgcactactcgcaagcggtcaaggtcggtcaccgcgtggaaacttcgggccagggcggctgggatgacgactttcagattcccgccgacattgccgaagaaatcgcccgggcattcgataacctggatcgcaccctggccaccgcaggtgcgcgctgggaccacgtcattcacgtaaattcctaccacgtcggcggttttccacccgaggtcaatgaggcgatggtcgcgcagtaccgccgctacatgccagaccatgcgcccatctggacccaggtcggcgtcgaggccctggggttgccgaccatgcgcgtcgagatccgcgtaaccgccatcattccctgacaccaaacgtgcggattacccagtcggtaaacactttgagccgcgcgctttgatgacggttgggtgggtaaagaatatgcaacggcgtggccggacgtgaccaatccggcaacacgcggaccaactgaccgctgtcgatgtagtactgcacgatcgattggaagtgttgccccacgccaaggccggcgagcagcatttccttgaggccattgccttcgttggtggagaaggcacattcaccgacttcaatccgtcggccacctttctcgaaaatcagcggctcaggcttgcccgaaccggcgaagaaatagccggccttgaggtggttcgcctgcaggtcctccggcgaccccggcacgccccggcgttccaggtaaacgggggccgcgcaggtcaggtattcgaggtcggctaccttgcgcccgatcatcgccatgtcatcgagcctgccggcgcgaatcacacagtcaacgccctccccgacgatattgaccgcgcggtcgctgatacccagggcaacggtaatgtcggggtactcgcgatgaaaatccaccagtgccggaatcaacaaacagttggcaaacgacgccggcgcatccacccgcaggtgcccgcccggcttgagggtttgcccgcgtacggcgctgtccacttcatccagctcagccaccagacgccgggcatggccgtaatattccagaccttcagaggtaggcgccaaggcccgcgtggtgcggtgcatcagcttgatgcccaggtaggcttccaggtcggtaatcagcttgctgacggtggaacgcggcagcgccaactgatcggacgcccggctgaacgagccggtgtcgacaacccgcacgaaggcgcgcatggcgagaagttggttcacagggggagttcccgtacgccgttagtaagcaaagttatcgatcttgacctgaccatccggaaacgtcgcgatgatttcaagctcgccccccatagcacggatgtagtcacgcaaagtactgatgtacatgtcggtgcgacgctccattttcgaaaccgctgcctggttgatgttcaacgccttggccagactctcctgactcaactgctgcgctttgcgcagctcatgcaatggcatttgcttcaggtgctgctggaatatctgttcggcatcggcgcgcgattcggggggcatgcgcgcttgaagctcggagaattttttagccatgtttacggccctctttacgcaatgtttccaaatgtacgccatacaacttgtctgctatcgggacatgttcttcgtaccaccgattttgtgaggttttatccccgccaatcagcaggaccgcacaccgcctgggatcgaaggcatacaacactcgatagggtctccctgcgtgctgtattcgcaactctcgcagattgccatggcgcgagcccttgatatcactgctgtgaggaaagcgcagaccgggcccgaacaaccccagtagatcaacactggccgagaccgaggattgttccttcgcgtccagttcgtcccaccaaccttcgaattcatccgtgtactctatgtcccagaccatgcaaatatgccacccaaggaatataaactcaaggttataattcaggatcaggattggcgatattgccaggcgagcttcaagggaaattgtttgtacattcttcaaaccgaaggaattggaactgccagacagctcagccatttcagaattgtttgagaaatgtacgcgcaaaaaaaaaccgccctttcgggcggttcaaaggtgctcggctttgatcagaaaccgagggagaaactgatggtcatcgcgtggtccttatcgttgcgcgagagttggcccgagtagcccaggcccagcttgccgttctggctgatctggtaatccacaccggcttccagcaccgcgctgtccttggcgatcggtacgccttgggtgctgaacgacgccccgccgttgatgaagctcaggtcggcgtcgggtttggtgtcaccgaaagcgtgacgccagccgatgctgccccgcggggtgattttcgagccgttacccagggtgatggtctggccgatgcgcacgcccaaggtggagaaggtcacgtcctgatcggcatcgccgcgcagggctgcggaaccgcccttctctttgagggtgtcgctgtcgtagttgacgtaggccaggcccgcgaacggttccagggccacgccgcccgcttcgagggtgtaaccgacttcaccgaacacttgtgcactgcgcgccttgtagtcggctttgaggcgttggcccacaccgcctacggcgacgtcgcgcttgctttcgatgtcatgccagctgtacgccacgcccatgcgggccgcgaaagcttcctgctgatacgcggtgtaagccatcaagtggtagctgtcgacgtcggcgctggagttgcggcgcttggcgtccaggtcgctgcgggtgtagccggcggctacaccaacgcgccaagcgtcatccacttgcttgtcggtgccgagcaggaagccgccgaggttgcggtccagtttggcagtgttgctgtcgccgcccatgtggccccaggtgcccaacacgcgcatccagccgaccatttcgccatggcaaccggcgctgctgaggcggttttcgctgggcgccaggctgttgcgcgggtcgtcctcgcggtagcagccaggttggcgcaggcgctcgttgaccgcgtcacggatgtaacgcgaatcctcaagcatcgcgctggcggtgctggcgtgaatttcaccggacaagctgtcgaaggccgcacgtgccccggccgcatccgagttcagcagcgcattctgcacatccgcaccgccgaccgccgcgccgctgcccaatgcggctgcaacaccgcgctggttacgggtggccgccacgctggcgtagctgacgttgttacggctcacggccagcgccacttgcgtcgggctgtagttgagcgaggtattgaggaacgccaggttctccaggttggtggtgttgaaggtgccattgaccgcgccggccgtgagcaaggtgtaggtggtcgggccggcatacggggccaggttgaccacattcagcgtgccgcccaggttcgcggtgccgccaacggccagagagctggcgaccgatggggtgatcaccaggttcagcgcgccatcgctggcgttggtgaagttaccggccactgtcagcttgccgttgtctggggtgaccgcaccatggttgacgacggagccgacactgccgttaccggtcaggcctgcgccgctggccacggtgacctgcccgccgaagacagcgcccggattggccgcgttgcccacttgcagcacgccctgatccaccgccacggtgccgctgaacgactggttgccggtcagcaacagcgcgcccgcgccttgtttgacgatggcaccggtgccggtgaggttgccattgaactggccattgttggcctgcacgaacaacaagcgtgcattgttgaggatcgaaccgcgcaggctggtggtgttaccggccagcgtaccgccactgacggtggtgccgccagtgtaggtgttggcgccggtcaacagcaaggtgcccgcatcgagtttgttgatggcgccggcgccggcgatcggtgccgaaatttccgtggtaaccccggaattgacccgcaccgccgccgtgccggttggcgacagcgtaccgccagcgcctgccgtcagcgtgtagccggcgtcaaggaactgcaggccggtaaagccctggttgcccacaacggtaacggtgccgccctgcccgccgaatacggcgaactggttgttcgacgcctggccttgggtgccggtcgggtcggtccagttggtgcctgggccccaagtgccgctgccgcctgtgatggtgccatccgggttggtggtgccgccgttccagaactggatttgccccggtgtggtttgcaccagcaggttgagttggttggccaacgaggtttgcagggacagattgccaaagcctgccggcagcgaacccagggtcaggccgttgtccgtcaaggcgccgccgtagcggaacagctggtacacgccgataccgaaaccgccggcatcggtgacattgagcgtgccatccagcgtcaggttacccgccacattcactgcggtcgtggacgcacccggtgcccccagggcgaagttcaggttggtacccgaagacaacgccagcgatcccaccgacagcggcgtggccgctcccgccttgaggatcgaaccgtcggccatgctcaccgcgccacccagggtgccgctgccgccgagggtcgcgccattggcaacctgcaccgcgctgctgttcaaggtgccgttgaccaacaggctgccggcattgacgttggtgttgccggtaaaggtgttattaccgctaagcagcaaggcgccggtgccggttttgttcagcaccccggcgccggtgaggttaccggtgtaggtgccatctgttgcctgctcgaaggtcagggtcgcgttgttggcgatggccccttgcaggctgttggtggagccggtggtggtgccaccattcagagtggtgccgccggtgtaggtgttggcgccggtcagcaacagtgcgccgttgccgtttttcaccaggctgccgttaccgctgacgacgccattaagggccaggtcatggctgccagccagagtcaacgggccgcccaggttgatggcattggccagttgcaggtcggtgctgccgtccagctgcgcggcgccgccgaccgtcagtgcgccagtgccgagggcggcgttgttgccaagtaccagttggcccgcattcacgccagtgccgccggtgtaggtattggcgccattgagggtcaaggttgccgcaccttttttcagcaggctacccgccccgctgatgccgccattgagggtcagcgcattgctgccgccaatcgccaaggcgccattgaggaccgcagcattgcccagcgccacggccgcattgctgtccagggtggtgccgtcggcggcggtcaaaacaccggtgcccagcgcactgttgctgccaaccaccagcgtgccgccattgagcgccgtcccaccggtgtaggtgttggcgccgttgagcaccagcgtaccggcgtcgagcttggccagtgtaccggcgccggccagggtcacgccgagggtggcggtggcatttggatcaacacgaactgccgtgttgcccgtaccaccattcaccaggttaagcacacccgccgtgccggaggccaggttgtagccgtcggtgacgaactgcatgccggtgatgttttgcgtgccgtccacgctcacgttgcccgccgccccctggaacaccgcgaagctgttgttccagttctggttgagcgtgccgtcgacgttggtccagttggtcagcccggtgccccaggtgccgttgccgccttcaatggcgccgttgccgatcaggttgccgccatcccagaactgcacggtggtgttgggcgcggtgaccagcaggttgaccttgttgctgatggccgtctgcacttgcaggtcgcccgggatcacactgcccggcaaggtgccgagggtcaggccgttgtccgtcagcgccccggtgtagttgatgatgttgtagacgccactgccaaagccgccgatatcggtgacgttgaggttgccgtccagggtcaggttgccgccgacattcagcagcccgctgccaccgccgaccaccggagttccaaggcccacgtccaggttggaattggcgccgagtaccagtgagcccaccgacaaggtgctgccggaggtcaggccgatatggccgccgtcggccacggtgaccgcgccggtcacagaaccggcaccggtcagcgtcccgccgttgttgaccgccaccgtaccgctggccagcgaaccgcccacattcaaggtgccgccgttgacgttcgcagcgccagtgatgccattggtgccggtcaggttgagcacgccagtgccgtttttatccaggcctcctgcgccgttcagtgcgccggcgaaggtgttgttcaggttgctgccgcccacggccaaagtgttgccgccagcgacttggaccacgccattgccggccagggtattgaggttggcattgccacccaggttcaggctggcgccggtacccacggtgacgcccgaggtagtgcccagtgcgccattgccaagcgtggtcaggctgccgcccaccacattcaacgggccggtgaaggtgttgttgccagtgagcagcaggtctgccgcgccgtttttgatcagcgccgcgttgcccgccagcaccccggagagggtcaggttgttgttgccggccacggtcaggtcagcgttgaggttgacggcgttggccagcaccagtggagcactgttatccagcgtccccgccccggcgacggtcaaggcgcccgagcccaggccggcggcattgccgacggtcagggtgcccgcattcagggtgctgccgccgctgtaggtgttggcgccggtcagggtcaggttggcgttgccgttcttgatcagagaacctgcgccgtcaaccactccgctcaagctcaagtcgttgctgccgcccacggtcagtgcggcattgagggtggtgttattggccagggccacagcgctgccggtgtccagcgttgcggcaccgttgacggccaggttgccgctgcccaaagctgcgccgttacccagcgtcaaggaacccgcattcaattgggtgcccccgaggtaaccgttcgcgccgttaagcgtcaggttcgccgccccgcttttggtcaggctgcccgcgccattcaccagaccgttgagggtcaggtcggcgctgccgagcacccccaggttgccggccaggttcagcgtattggccagtgccactgccgtactggtgtcgagggtggtaccggcggcggcgttcaaggcacctgtgcccagcgcggtgctggagccgatgatcagcccgccagcgttcagtgcggtaggcccggtgtaggtgttattgccattcaaggtcaggctggcgatgccgtttttgatcaggctacccgcgcccgccacggtgcctgccagggtcagcgcattgctgccgccgagggtcagcgtgccgttgacgttcagcgcattggccaggctgaccgccgcgttgctgtccagcgtggtgccgttggccgtggtcaatacaccgctgcccagcgcactgtcattgccgaccaccagcgtcccgccattgagcgcggtgccgccggtgtaggtgttggcgccgttgagcaccagggtgccggcgtcgagtttggccaaagtgccgccgccgttgagggtgacgccgagggtggcggtagcgttgggatcgacgcgcacggcggtgttgccgccggtgccgttgaacagggtcaaggcccctgccgtgccgcccaccaggttatagccatcggtgacaaactgcaggccggtgatggcttgcgcgccgtccacggtgacggtccccgccgagccctggaacaccgcaaagctgttcggtgcccaggcggcattgaacgagccattcacgccagtccaattggtgctgccggccgcccaggtcccgctgccgccgtcgatggcgccattgccggtggtctggctgccgtcccagaactgcacattggtattgccgttgaccagcaggttgatctggttgccgatcgcagtttgcaggtccaggtcagtggccggaatgttcaccggcaggctgcccagttgcaggccattgttggtgagaaggccggtgtagtcgatcagccggtaaatgccggggccgaagccgccgatatcgctgacattcagggtgccgtccagggtcaggttaccacccacgttgatcaatgccgtgccgcctgtggacggtgcaccgaggcccgcgtccaggttggaattggcattcagcaccagcgcacccacgttcagggtgctcccggagttgaccgccaggtggccgccatccgcgatattcacactgcccagcaccgtgccggtgccgccgagggtcgcgccgctgccaaccccgacactgccgctggccaatgagccattgaccagcaggctgcccgcgttgacctgcgtattgccggtcagcaggctgatgccggtgagggtcaaggcgccgttgccgtctttggcaaagttacccaggccggccagtaccccgccgaaggtgctgttgaggttattgccacccacactcaaggtgctgccggtgccgaccgtcgccagcccgctgccggtaagttcgcccaggctggcggagccgcccaggttcagggctgcaccgcccgccaggttgaccccggcgccaacgcccaacgcgccgttgcccagtgtggtgaggctgcccgattgcacatcaaacaaaccgctgaaggtgttgttgccagtcaaggtcaggtctgcggaaccggttttgatcaggctgccgctgcccgctacaacgccgcccagggtcaggttgttattgaggccgcctacggtcaggcctgcgttgacgttgaccgcattggccagcaccaacggtgtgctgttgttcaatgttgccgcaccgccgaccgtcagcgcgccgccgcccagggccgctgcgctgcccagggtcaaggtgcccgcgttcagcgtggtgccgccctggaaggtattgatgccattgagcgtcaggtctgcagcgccgtttttgaccagcgcgccggcgccactgacgaggccgcccaacgtcagatcgttggtgcccgccaccgtcaggttggcgttcaggaccacgccgttgccaaccgtcagcaccgagttgttatccaggctcgccgccccaccgacggtcaggttgcccaggccgagcgccgcgttattgcccagggtcaaggtgccagcgttcaacgtcgtgccgccgaggaagccattgccaccattgagagtcaggttggccgcgccatttttggtcaggctgccgacaccattgatggcgccgcccagggtcaggtcagcggtgccgccgatgcccaggttgcccgccaggttgatggcattgctgacggtggtcacggcggtggcatccagcgtcgtaccgttagccgcattcaaggcgccggcaccgagtgccgagttggacgccaggatcaaaccgcccgcgttcaaggccaccgggccgagaaaggtgttggccccgccgagggtgaggttggccgcaccatttttgatcaggccgcctacgccgccaatcgcaccattgagggccagcgcattgctgccgccaatgctcaggttgccgttgagggtcacgccgttgccgagcgctgccgcggtgttgctgtccagcgtcgtaccggctgccgccgtcaacacgccgctgcccagcgcggtattgctgccaaccaccagagtgccgccgtccagctgggtaccgccgctgtaggtgttgtttccgccgaggaccagggtgccggtatccagtttgttgatcagcccggtaccgttgatatccacgccaatggtaccggtaacgcctggatcgacacgcaccgccgtaacaccgaccccgttgttgaccgccgtcaacacgccgcccgtcccgttgaccagggtgtagccgtcggtcacgaactgcaggccggtaaaggcttgcgcgccgtctaccgtcaccgtgcccgccgtgccctggaacactgcgaagccaccgccccaggtctggttggtgttgccgtcggccgaagtccagttggtgccaacgccggtccaggtgccggtaccgccattgacgatgccgtcagccactgtgttgctgccatcccagaaccggatgttcggcgcggacaccaccaagttgacctggttgcccaccgaggtttgcaccaacagatcgcccaggccataacccgttggcgccgtggccacgttgaggccaccgctgagcgcgccggtgtagttgatcaatcgatagacaccggcaccgaaaccgccggcatcggtgatattcagattaccggccagggcgacgttgccgcccacgttcagcaaggaagtggtcgacggtgcgcccaaggcgacgtccatgttcgagccggcattgagggtcaaactgccggccgacaaggtgttaccgctgctcagcgccaggtgcccgccgctgttgacattgaccgcgcccaacagcgagccggtgccggtcagcgtgccgccggtattgacgttgacaaggctgctggccagcgagccgctgaggttcaacgtaccgccattgatagccgtattgccggcaaggccattgatgccggtgaggttgagggtgccggtacccaccttgatcaaaccgcccgcgccgctgaggtcgccgtcaaaggtgctggtggtgttgaccccgccgatagtgagattggtgccgccgcccagttgcacgccacccgcgccgctcaggcccgccaggctggcatcgacgcccaggttcagggaagcaccggcactgacgttggcgccggaactgccacccagcgcgttggcactcgccagcgtgacgctgccggaaagcacatccacggccccggtgaaggtgttgttgccgctcaaggtcaaatcagccaagccatttttgatcaggccaccggcgccgctgaccacgccgccaaggttcaagtcgttgttgccggcaagggtcaggttggcgttcaacgcaatgtcattgcccagggtgaaggctgcgctgttgtccagagtggctgcgccaccgacggttaaagcaccgctgccgagtgcgcctgccgaacctatggtcaagctgcccgcattgagtgtggtaccggcgctgaaggtgttcacgccgttgagtgtcaggttgcccacgccgtttttggtcaaggtacccgtgccgctgaccacaccgccgagggtcaggccattagtacctccgacactcaggccggcgttgagaatgacgttgttgcccagggcaaccgaggcgttgctgtccaggatcgcggcgccaccgatggtcaggtttcccacccccagggcagagttgttgccaacggtcagggagcctgcgttgagggtggtaccgcccaggaagctattggcgccgctgaggatcaggttggccgcgccgtttttggtcaggctgccagcgccattgatcgcaccggtgaggttgaggtccgcgctgccgccaacccccaggttgccggcgaggttgacgttgttgttcaggctgacattcgcattggcgtccagggtcgtgccccctgcggcgttcaaggcaccagagcccaatgccgtggcagcccccacgaccaacttgcccgcattcagcgcagtattgcccaaataggtgttgacgccgttgaggaccaggtcggccgtgccgtttttgatcagcccgccgacgcctgacaccacgccgcccagtgtcagggcattgctgccacccagggttacgttgccgcccaggttgacgttgttagccaagttgaccgcagcgctggcatccagcgtggtgccgtttcctgcgttcagcacgccggtgcccagcgccgtatcggagccgacttgcagcgtccccgcgttcagtgaggtgctgccggtgtaggtgttggctccggagaggttgagggtcgaggtaccggttttgatcaagttggcgccgccactgataacgccacccaaggtcagggggttggcgccgcctgccgtcaggttggcattgagcgcaatcgcgttgttgatcgtcagattggtgttggtgttcagcgtgcccgcgcccgctacggtcagcgcgccggtgcccaatgcggcggcgttgcccagggtgagggaaccggcattcaacgtggtgccgccctggaaggtgttggcgccgttgagggtgacggcggccgcaccgttcttgatcagcgccgacgcgccgtcaatcacgccgccaagggtcagcccgttcgcgccggccaaggtcaggttggcgccgaggttgatggcattggccagggtgacgccgccgctattgtccagggttgcagcgccagtcacgctcagtgcgccgctgcccagcgccaggttgctgccggcattcaatgtgccgccgttgagcacggtgccgccctggaacgtgttgacgccgttgagcagcagcgcagaggcgccattcttggtcaggctgccaacgcccgtgatggctcccaacaggcccaggttctggctgccggtaagcgtcaaattacccgccaggttcagggcattgttgaggataagcgccgcactggagtccagcgtggtaccggcggctgcgtttaacacaccgcctacacccagggacgtgttattccccaggatcagggtaccgccgttaaggtccgtattgccggtgtaggtgttggcgccacccagcgtcagtgttgccgtaccgtttttggtcaggctgcccgcaccggaaatgatgcctcccaggcccaacgcctgggtaccgccgagggtcaaggcaccggtcaagttgaccgcgttagagagattcactgcggtgctggtatccagtgaagttcccgccgccgtattgagcgcgcctgtgcccagggcggcgctggaaccgaggaccaggccaccgccattgagcgtggtagccccggagcgcgtgttgttgccggtcaacgtcagcaggcttgcgccgtttttggtcaggctgccggcccctgacatcacgccactgagcatcagcgggttggccccggtcagggtgaggttgcccgtcagggccatattgttggtcagtaacgaagcgccgccggtatccaggctcgcagtgcccgtcacattcaggccattggcgcccaaggcgttattgttgcccagcaccaaggtgccggcgcccaggctggtggtgccggtgtaggccgtgttgttgccgttgagggtcaggctgccggtgccggttttggtcaggtttgctgccccgctgagtgcgccgccgagtgtcaaggcacccgcgccagtggcggtcaccgcactgttgagcgtgattgcgttggccaggttcaccgtacctggcgccgtcaacaccgccgcgccaatgatcgagacggcgccggtactgaaggccaggctattgcccagttgcaccgtgccaccgttgagtgtggtagtgccgccgtaggtgttggccgcgccgagggacaattggcctgagccaatcttggtcaaaccgcccgttccggaaatgacgccggacaaggtcaaaccattgatgccctggacggtcaggccgccggctcccagggaaatcaggttgctcacgttcaaaccggcgttgctcgcctggaggatcccgccattggaggtcagcaccccgctgccgaacgccaggttgtcattgaactgcgcaacaccgccattgagtgtggaactgccgctgaccaaaggcccctgcaaggtccaggtaccgctgttgatcgtcaggttgttgaagttggtgtagacgccactcgatgcggtgccggtgccagtggtgccaccgcccagaccgaccgggttttgcaggatcagtgtgttggcgccggctgccccgccatcaatcgtgcccgtcggggcgaagttcaggttgatacctatcaagccgccaagaccgacgctgacttgaacgccatcccccacgttgacactggagcccgtaattgccgtgaaggtattggtgccgcccgcccccatcgaaacgccgccggtaatgttaccggcgttggtaaagttgttgcccgcagcggaagtctggaaagccacccgcccgttgagggtgccggagctgctgttggtcatgttgacctgcgagccaccgtacacacccaccaccggggtatcggcgatcgtaatcccccctacggacaggccggttgacgtaatagtgccgttgttggtgatgttggtcgtaccggtcgagccgttattgaccgcaatacccaacccgtcgatgctcgtcaggttaagccccagcagcatccccgtgccgcgaatgagcccggtggtggcgttgaccacattgatggtactggcggcgcccgaaccgataaacgcaccgccgctcaacacggacaccagccccagcagcgccgggtccagggtgccggcgttgttaagggtgatggtgtccccggtgagattcagtaccttgcccgccagcgtcgcattcatctgcgcgccattggtcacgttgacggtgaggccgctggtggcactggagaaatcgttgagaaacagcggaagggtgggtaccccggagcaggtaatggttgaacccgccgccgagcacgtggccaatgcctcgggactcgccaggcccaccatcacccccacgatgcccaggcggattgccatattcagaggggaaatacgagaaataccggcagccgcaagtcttctgtccacgttcaactccttcgtggttcaagcctttcatccatgaatgcgcagaagccttcttataaagatccacacgcatcgaattcgagatgcctgaccgtggtgacaactgatctagtttgtcgaaacggtagtagacctacagaaaagtcattgaattaaatggtattaatactttcgtaaatagcctgtaagaatgggattacacccaacatccattgactgtcgcgacaaaaacacaggtttcaaaacgtaaaaaagcgctctaatggcgccctgttgattggctttaaagatcctggagttcgcaatgccccatgaaggcaacctgttacaagcagccgtggtattcctgctcgccgctgtgctgaccgtgcctttggccaagcgcctgcaactgggcgcggtgctgggctatctgttcgccggcgtgatcatcggcccgtcggtattgggcctggtgggcaacccgcaaagcgtcgcgcagttctccgaattgggtgtggtgttgctgctgttcatcatcggcctggaactgtcacccaaacgtttatgggtgatgcgcaaagccgtgttcggcgtcggcctggcccaggtgttgctgaccggtttggtgatggccgtgatcgcgctgtggctgtttggccaaccctggaacagcgcgattgtgctgggcctgggcctggcgctctcctccaccgccttcggcctgcaaagcttggccgagcgcaaggaactcaaccagccccacgggcgcctggcctttgcgattctgctgtttcaagacatcgccgccatcccgctgatcgccatggtgccgctgctggccggcagtgaccaccccgccaccgaagcccagggcgtgcagcacgtgttgcagattctcggcagcatcgccgtggtgatcattggcgggcgctacctgttgcggccggtgtttcgcatcgtcgccaagaccggcctgcgcgaagtgtccaccgccaccgcgttgctggtggtgatcggcactgcgtggttgatggaactggtgggggtgtccatggccctcggcgccttcctcgccggtctgctgctggcggactcggaataccgccacgaactggaatcccagatcgagccgttcaagggcttgctgctgggcctgttctttatcagcgtgggcatgggcgccaacctcagcctgctgctcagcgcgccactggtggtgatcgggctgacgttgttgctgatcggtttgaaactgcccctgttgtacgccgtgggacggctggcaggcgacctcaaccgcgaaagcgccctgcgcctgggcgtggtgctggcggccggcggcgaatttgcctttgtggtgttcaagatcggccgcgaccagggcctgttcgagcctcacctctatgacattctggtgctgaccatcacgctgtccatggccgtgaccccgctgctgttgctgatatgtccaaagctgttcaaacccaaaaccaaacccgtggaagtacccgaggaataccgcaccatcgaaagtgatgcgccgcgcgtggtgatcgcgggcatgggccgtatgggccagatcgtcgcgcggatcctgcgtgcacaaaacgtctcgttcattgccctcgacacctccgtggaaaccatcgagctgacccgcagcttcggcggcatgccggtgttctacggcgacccccaacgcccggaaatcctccatgcggccaaagtcgatcaggccgagtttttcgtgatcgccatggatgacccggagatcaacatcaagaccgccgaattggtgcgcaacctctacccgcacatgaagatcattgcccgcgcccgtaaccgccagcacgttcaccgcctggtcgacctggacgcctcgccggtgcgcgagacgttctactccagcctggaaatgagccgccgtaccctcgtcggcctcggcttgacccaagcccaggcggatgcgcgcatcacccgcttcaagaaccacgacctgcaagtactcgccgcccagcatgcggtgtacgacgacgcggccaaggtgatgcaaaccgcccaggaagcccggacagaattggcgcgattgtttgagatggaccggctcgaggaagagtccgacaaggtgtaagccgacgggcgaacgaaattgcgatttttctgacagaatacgccgcaatttcgttcatcactggagcgcttcatggctactttcaccaagaccgccgccctgctggccctcgcgctcaccgccggcagcgtgctcgccgccaccaaaccgtcgacacagaccatctccaccctggacggcaagttcaccttcaacctgcccaaggcctatacggccgacaccctgccctccggcaagacggaggatggcaccgccaatacccaaggcacgctgtacgccaacgcgaccacgaaaagtgtggtgatcgtcgccgaaaccgagcgcaacgacggggcaagcatcaaagacaacgacccacaattcctcgacggcgccgtgaccgatttcgtcaaggatcagagcgccgcgctcccggacttcaagaaacaaggcgagaaaaaactgaccttcaaaggcctcggtttgcgccaagtggacagcacggccacacagggcggtggcaagaccttgaactcgacctttctgggcggctcgggcaaccacctgctggtgatccaggcgatatcccgcgcggatgatgtgaaggggcatgccgagttggtgaagcagatcaccggcggtaagtaacctgatcgctctagccacttagaacccatgtgggagctggcttgcctgcgatagcgatttaccagtcaaccctgcggtggctgatacaccgatatcgcaggcaagccagctcccacacttttctgaccgtgtttacttcaggctcttttccagccaggccttgaggtcctgtatttcggcctcactcacggtatgcggcatgcccacatacccatgaaactccggcttcaaccccagccccgtcaacacttcattcgcccgggctgccgacacatacggcagcgcctgatccagcgtgccgtggcctataaagatcgccagcttgtccagcgccgcctccggtttgagctcggccttgagcaccggcaacacgctgccactcaacgccgcaatcccgcgtaccgactccggctgacgcagcccaacttcgtaagccatgatcgcgccctggctgaaccccaccagaaatacccgatcgcgttgagtgtggtacttggcagtggcctgggtcacgaaggcttcgatcagtttggcgctgcgttgcaggtcagcggtttcgccgtcgtaatcgccatcgccgggcttcctggcgaaccagcgatacccgctcgaatccaccggcatcggcgcgcgggccgacaggtaagtccaggtcgacggcagttcgtccttgatgccaaacaggtcttcctcgttactgccaaagccgtgcaggaaaatcaccagcggctggttgcgcgcgtcactctgggtctgttccaggtacgtcagcggcaagtccgtgtgcaagctggaatcggcatgggcggcactggctgacaacgccagcgccagggcaagcagtttgagcatggaaagcgacctcaaggtttgcgcaacaggtaggtgtccatgatccagccattttccaggcgtgccgccttgcgcacccgttggatttcgtcagccacttgcgccactttgccgctgatcaggatttcatccggcgtgcccaggtaggcgccccagtagatgtccaggtcttgatcggccacggtgcggtaggaatcttcggcatcgagcatcaccaccagcgtgtcggcatcactcgcctgccctgcggccagacggcgcccggtggtgatctcgatggaacggccgatgcggttcagcggcaccttatgctgcgcggccagggcctgcacactggtgatgccagggatcacttcgaactcaaactcagcgcggccgctggcaagaatcgcctgcaggatacgaatcgtgctgtcgtacaacgccgggtcgccccaggccaggaaagcgcctacttcgccgtcgatcatttcctcgttgatcatgcgctcgaaggtctgctgcttgtcgcggttcagatcctgcacggcggtggtgtaatcaatgtcaccgcgcacgcgctcggggcagtcagcctcgacgaagcggtagccgggctcgctgatgtaggtctcgcagatctcgcgacgcaggtcgatcagcttgtctttgctctggcccttgtccatcaggaaaaacacgtcggtgcggttcagcgccttcacggcctgcatcgtgatgtagtcagggttaccggcgccaatgccgatgatcaggatgcgtttcatgggttgctctcattgcggggcgtggattttgccatgttcgcgcgctcaggcgtgagtttccaggcgcaggcgccacaggttgttgaagcgcagttcggtggcggacagcggctcgacgtcgatccggtagaacatcgagacaggaaactgcatgacgtacagcatggcggcgcggatcacgaagggatgggtgacggcgaccacatggccaggctgggtttccagcgccttcatccattgcccgacacgaacacagagctgatccaccgactcgccaccatggggtgcactggcgctgtcggtcatccaggccatcagtgaatcgctttccagctcactgatggcctgacctttccagccaccgaaatcgccatctcgcagcgccccatcaatgtctgcgtcatcaccgaacaagcctgccgtttgccgggttctggcttcgggcgcgcacatcaggcgccggttcttcttgtagcgacccgccagggacaaggccgcgccctgccaatccatcaagacggattcgtcatcaggaaaccgcccctgtttttgaaggggcgtgagggcatggcaaatcagggtcaagcgggtggccagcatcacaattcactctgtttcggcgcgcagtcagcgtagactcgcaaagttgtttcaacatgttacaacgaacatgaaacaggaagccggttcaaacccggcgcggtcgcgccactgtattcggcctcacagccgtaagccagaccctgtttcagccctctcgctatccatttcgggacgcgtcatccctggaggttttcatggctaacaccgctgcaacaaaccctgatgtctatgtgccgaccatccccctgggcgaaatcctgccctgggcgatcttcggcggcctgctgttgctgctggcaatctacttcgtcggcgccgagcaaggcgccacggccgtgttcaaaggcatgtatgtgcacgagtttgtgcacgacggccgccatctgctgggtttcccctgccattaattcatcagagagacatgacatgacagggcatttactcgtacgcgggatgctggtgggcttgctcgccggcgtgttggcgtttggcttcgccaagacctttggtgagccgcagatcgacaaggccatcgcctttgaaggccagatggcacagatgcacggcgatgcgccggaagaagaactggtgagccgcgaggtgcaaagcacctttggcctgttcaccggcgtggtggtgtacagcgtgtccctgggcggcatcttcgccctggtattcgcttactccctgggccgcatcggcaaggtcggcccgcgcggcctggcggcgttgctggcattggcggccttcgtcaccctcatcgtggtcccaggccttaaatacccggccaacccgccgtcggtgggtgaccccgagaccatcgcacagcgcaccaaactgtttttcctgatgctgctggtatcggtagccgccgccgtgattgcgatcaacgccgcacgcaagctgatcgccagccgtggcctctgggccggcgccatccttggcgtggcgctgtacatcgtgatcgtgtcggtggccggcagcctgttcccggtgatcaacgaagtacccgagcaattctccgccgtattgctgtggaaattccgcgtggcgtccctgggtatccaactggtgctgtggaccaccctgggcctggtattcggtgctgtggccgaacgcaaattgagccagccacaggcaaggttcaactcataatgcgttagatccccggacgggccaggtaccacacctgatagcccgtcccgggatgcgctgcgtccagcgccgctgccgacaaggtgatccgaatcaagcgccaggcctgcacatccagcgccaggaataccgcgaacgtgtcgctgctatccgccaactgttggttgcgcactttctcctcggccaggatcgcagcccgatccgcacccggctccagcggccattcttcccgatacaaactcaacgcgttctgcgccgggccccgttgcacgtccaacggcagccagctctcgatgtgcgggcggccaaagctgtcgagcaccttttgaaagcgtgcccccagcaaaaaatcagcggcccgcaacgggtcggcccacaggtacaccgacgagtacaggttgcccccacgctcctgggcgataaacgccttgaacagcaacccttcggcgtgatcccacaacggccccaactgcgcagcgcggcggcgaatcacgcccatgtcgtaatcggcaggcaggcggtgtgaatactgtttggcaaacatggcgaaactcccgtgctggatgagcgtttagcttgcgcagcgtcgatgatttcaacaagatatcatccgatataagtgcaataaggagttgaaatgactgatgcactcaaacccctggatatcgacaccgtgcaggccttcgtgctggtggctgatttcaccagtttcacccgagcggccgaagctctcgacacctcgcaggccgccatcagcctcaagctcaaacgccttgaagaacgcctcggttatcgcctgctggaacgcaccccgcgccatgtaaggctgtcgccccggggagagcagttcatcgtcgccgctcgcgcattgctcaatgcccatgagcgcgccttgggtgacatgggcactcaagcaccgaggcgcttggtgatcggcatcagcgaccacgtggcggggccggacttgcccttgtggctcagccgactggcggcgtacgacccgatggtgattcttgaagtgcgcatcgcgtcctcgcgcgatctggtcgccgcctttgatcgcaacgaactggacgcggtgatcgtgcgcaacgagggcgaccgccaggacggcgacgtgctggcggtggagcgctttggctggtttgcggcgccgacctggcagcacagcccgggcactccactgcgcatggcgaccatggcggcgccttgtggggtgcggcacttggcgacccgggcgctggatgaggcgaacgtggattggaccgaggtgtttgtcggtggcggtgtgatggccgtgggtgccgcggtcagcgcggggttgggggtggccgccctcgcccaccgggtggcgccggcgggagccgtggaggtcggcgaacaattcggattgccggttttgccggtcagtgaggtggtgctgcatagccggatcagtgatgcgcgttcgcgggaaacattgcgggcgttgagtgctacgtttcggggggtgttgcagcggtagtggttttttttggggggggtacatatccgttttttcggtgatggctgagattggttccgctcttacagcgggtcactttcgaaaagcgcgaaagtaaccaaagcgctcttgccccaacactcggcacctcgctcacgctcggtgtgcccgtaatccgacagggatttggggggccgccgccacgcgccatccatggcgcgtcgcggctaaaccggcgtcctgccggtttgccccccaaatccctgtcgaattccggccagcgtgttttaacggggcgcccaagatcaaagtcaaaagcaagagcacggcggcctgacagccggcctgagtggtgtgaagcaaaggcggtcttgtgtgggagctggcttgcctgcgatggcatctactcgatgtgcctggaagaccgaggtgtctgcatcgcaggcaagccagctcccacagaaaagcaagcctgtggaggtattgaagtttgactcggtcaaaaaatgtgggagcgggcttgctcacgaaagcggtgggtcagtcaacatttttgtaattgagagaccgctttcgcgagcaagcccgctcccacatttgggtctccatttgtctggaggactgcaacctgctttagcaaaaacagcgcttttgattcaaccactcaggccggctgtcaggccgccgtgcttttgatcttgatcttgatcttgatcttgatcttgatctgaggcgccccgttaaacacgatggccgaacgcaggcttgaatccgtgggtaacccggcaggacgccgggttagccgcgatgggccagggatggcccatggcggcggcccacggattcaagcctgcgttcgggcacaccgagcctaggcgaggtgccgagtgttggggcaagagcgctttggttactttcgcgcttttcgaaagtgacccgctgtaagagcggaaccaatacccgccgttaccaaaaaaatggatatgtactccgatcaatcaaaccactcccgcctcccctcaaacgtccccacaatcaactccacaatcacccgcaccgaatccaggtcccgcacctgtgcattcaccgccagccaaacctggcgctgcatgcgctcatccagcaaccccggcaacgccaccaacccccggtcaaaactgctcatgtaatgcggcaacaacccgatgcacgcgccacaacgaatcatctccagcatcagcgaatacgcctgcacctgcaccaccgccgccatgcgctgcgccaccacgcggttccagggctgcaacgcatccacctgctcatccggctgccactgcaccaacatgtaatcttcaagatcctccagactgtccgggcgagtcgtcagtcgcgaataacgcttggcgatgtaaggcaaatactgcaaccgtgccagggcccgtggcgcttcagtcacaaagctcgggccggctgcggggccgttggcatccgacagccagagcaccacatccgcgtctaccgcttgcagcgacatctggctgtcgagggaaataatgtccaggcgcacgctggcattgcggcgcaacaaggcgatcaggtcgcgccccagaatgtcgtgcaggatcggttcggccaccgccaggcgtatcagcggttgctccaccaccggcaaccgtcgctcattggccagggccgccaactgcgcttgcaattgctgaccgtcacggctcagcaccaacccgttgccctgatacgtgaacaacgaatggcgcacttgttcttccaactgcgccaggcgcttgcgcagcagtgtcgccttgatgttcaagctgcgcgccgcctgcatgaaacagccacaccgcgcactcaccagaaaatagcgcgccacctccggttcgatctcgttggccagtgccagccaggcattgcgcggttcattcggcgtacgccaggcggcagccccctggggggcggacggttctagaaatgccatgggagactccctgtcttgtcggtcttgtgcatccattgcaggcccgcgtggctactccagcgccttgttcagttcagcgccgtcgatgatcaaggtggcggtattgagcatgccttccaggtaagccttggcgatctgctcctggcgctggacacgcaaggcctgggtcaggcgctcacgcagttcatccagcgtggcagtgcgcgccggttgctggccggtgagtttgagcacatggaagcccgccgcgctttgcaccacgtccgagactgcgccgaccttgagccgcgacaccgtgccgcgcacctccggaaccagttgctgcaacggttgcaggcctgaatcgccgccgtgttgagaggtgccggggtcctgggaaaattgcgtggccagggcggcaaattcccccggcgctgcctgggccttgcggctcaattcctgggcctggcggcgcaccgtgtcgaggttttgcgggtcattggccgcgagaaaaatctggctgaccctgtacagcggtggcgtcacccactcagacttgccggcgtcataggcctgctgcaattccaccgcgctggggtagtcggccggtacttggctgaccgacagcatgtagtcgcgaaacacgatttgctcggtggccgcgcgggtctgctgctccacctcagggcgttgccgccagccttgtgcgtcggcctgttcgagcacggctttttgcgccaggcgtgaacgcagccacgcctccagggcgctgcggttgccacgcaattgttcgcgggtttcggccggcaggctggccaacacgccttgtaattcgggcagatcaatctgctggtttcccaggcgggcgaccgccgcgccaccgcgttcaaggtgagcggcaggcgccggttgctgagcggcgaccgggtcagtgcccggtcgcagactcaaccctactgcgacgaccagcacagtcagcgcaccggcgccgacgagcagggtaggtttcttcacaggacaggcgcctcttcatccaccgcagcagtggctgcctgggcttgcaattgcgcggcctgctggctgtagtcgcgcagatagacgatgaactcctgcaacaggcggtcccacaattccagctggccgcgcaggtgcgtagcaccgacgccagccaccaccacatccatttccatcagcaaaaactcgccctgcaacgacagccgcgcaaagcgccgcgaagcattccacacttgggccaggccttcgggcaactcaccttgtacacgcagcgcgcaactgtaggtgaagtcgacaaagctgcccggctcggccgccgggttgccaaagcgcacggcaaagccgatgccctggctggcgctgagcaattgcacgatgccgttctgttcggtctggttgacgcggtagccagcttcctgcagcaggtcggtcaggcttttcggggtaacgctggtgatcagttgaacatcgctcatagtgtctcttccttgttgatcattgattaagggcggtgtgcggagcatcaaaccgattaaggtatagctcatcgccaaaaccctgggcgagttcctcgaacttcacccgtgcgccactggcgaaaggctgacgaatgctcatcacctcggccacgtcgattttttcgtaggccgccaggatctcccgggccacgccgtacatctgttgattcttggctgaacactgctgcacttgcgtgtcacgttcagtcagttgcgcctgcaaacgcgcacgttcggtttccttgcccttggccatcaccagcaactcgtcgtaggccttcttgaacttgccgatctgctcgttgctggccgccacctgggcctgagcctggctgtgcaggttctgctgctggccggccatttgctcggccacgccacgcaccttggccagttcggccgtcaactgcttgatctgctcctgggcctgcctggcctgggcttcagcggcaatacgcgccgcactcgcctgggcctgttcgctttgcagcgcctgcaactgctgggtggtgctgcgcaactgggtccgcaggcgctcctccatgccctcggccgacgcgccgccggcaaccagcaccagcaacagcccgcacactcttcgcatgttcatgtggcatctccctgcgcatcagaagcgcgtgttgagttccagttgcatcacatcgatttcaaacggcgcgccatacacttcggaggcgcttaaccaacgggcgctggcgtagatgttcttgtcgatgccgtagttgccgccgatgaagtagcccttggcgttggtgccccccaagtgaaacgaggagtcgttgaagccgtcgggcaaggcatccggctggatgtatttgtagccggccaatacgttccagtcgccgcgcttgcgcatctcgaaggcattgccgagggtgaattgcaccatcgccgcattgccgccactttcaaactggccgttgctgttgatgttgttgacgatctggccttcgctgcgcttgagcatctcgcccttgtcgtaggccaggttgtggatgtagttgccctgggtgcgcagcttgaagtcgctgggcagctcggcgtcccaggccaggttcaggtccagcacatcgaacttggacgccaggcccacaaactgcggctgcggggtcaggccgggggtcgccgggttcggggtgatatcgcgcagcaggaacacactgttgcccttctgcatgaaggccaggcgcgagccgtcggtatcacacgccggttggccggcccacggcctgcaagggctggagcgctcgccttcgatgtcgtcgaagtggtaatacgccaccgcgcccttgaggctgttgctgcggttgatcttccagttggcgccgacctgcccgccaaacagccatttggtgtcgctgtcttccttatcgaaaccattgctgctggcggcgtccgaggtgtactccaccgggaacgcaccgagggtgccgaacaggccccactcgctgttcaaggcatggttgaagttggcggcgatcccgtcgaagttcaggtccggggaatacagaatgtcagtggaatagaacgggttggcgaaacgccctgcggtgagtgtcacgtcctgagtggccttccagctcaggtagccctgatcgagccagatgtctttcttgccgaaaccgccgccgagggtctgggtggtggacaccgggttattgtcggagccggtaccgatgcgaatgcccgctgtccattccggcgtaatcaccgctttcatgcccaggcgtgcacgcaggcggaacaggttctcgcggtccttgttggaattgagcaagggcggcagtttggtgttggtgtctttgttgacgtcgtacgggccgctttcattgagcttggcgtagtcgacgatttcattgctgttgttgcccgagaagtagcgcgactcgtcacgcaggcgaatgtcgccatcgaagctgatgcgcgaaacccagtccgggaaagtattgggctgggcccagttttcctgcttggcagtggccatgacttcggccttgacctgatcgcgaatctgatcacgcaccgcttgcggcacatactgcacacgcacatcaccaggcgccgcagccggaccgctggcaaccactggggcggcattggcttgccgcgcctgctgggcttgttgctccgcctgggcgatcagcccgttggcggcgtcctgcgtcagtacaccttgctgcaccagcaggcggatcaggttgatcgtgacgttttccgacggcgcggccggggccgccgacgcctggccgaccagggtggcgatgaccatgccgaccgccagggtcagtcgattcacgggggaaatcatgtgtacgcaactcctgtaaaaaactgcatgaaaagggtttgatcaatccgggcgtcggcccttgagcgacaggcgcaccggcatggtcacggccgccggaacgcgttgtgtggcatggggcgcacgcaaggccgcgagcacttgcgcgtcggtctgcgcgtcaccgctggacttcaccagttcggcccgcgtgacctggccctcggcgctcaaccacaagtccgcctgtaccgcgtaggccttcttgcgcaactcggggtcgtctctgagcaggcgttgaaacacgccggccaggtactgtttgtaagtgccggtgcccaagccaccgccaccggagcccgccatgccgccgcccttgcccgcgccaatgttgaaaccgtcgttgccggactgcgcatcgccgtcgatctgcatcgggttggccaaatcgtcggcgggcgacggtggcgcttcttcggcaggcttgacctcctccggctcgggtgtgggcaccggttccgggattttttcttcgacctgaggctcgggttccttgggtttttccggcggcggtggcggcggtggcggcagcggaataatggtcggcaccttcggcgcttcgcggcgcacgccactcatgtcattggcccactgccataaaaaccaggcggccacggcccccagcagcaggccggcgccccacttcaacgggcgcaagcgtcgtgtgtttttcacgggtaacggcggcatcgggatctgtgcggtcatggctcagccctggctcggcttgccggtgaccagcccgacctgcgacagctccagccgacgcagcaagtcgagcacctcgatcaccttctggtactgcacaagcgcgtcgccgcgcacgattaccggaaagtccgggctctgcgccttctcgatgcgcagacgctcttccagttcgccgagggtcaccgggtaagcgtcgagaaacacctggccgccgtcatttaccgagatggccttggtcttggcctgggacagcgacaccgaggcactggccttgggcaggtgaatctggatgcccgagacctgggcggtggcggtgaggataaacatcaccagcaccaccatcagcacgtccaccaggggcgtgatattgatgctgtccacggcggcatcttcgtcgtcatcgtgggaggcgtttacggaagccatggcgattctcctcaggccgaaacggcagcgtgatgctcacggcggtgcgccgcttcgctggtctggctctcgccgtgcatttccgccaggcgggtgatgaactcgtcgacgaacacacgcatgtcggcgctgacttccttgttgcgcgtgatcaggcggttgtagccaaacagtgccgggatcgccacgaacaggcccatggccgtggccagcaaggccgccgccatgcccggggcgatggcattgatgttcacgtcaccggccatggccgtgccgaggaacaccaccatgatccccagcaccgtgccgagcaggccgatgtaagggccaccggcgatggcattcgacagggtcgacagcttggcactcagcgcctggttctcgcgggtacgcacgccgtccatggagcaacggatggcttcaatggtggccgccgacaccgatgaggtgtcagcgccctgggcacggcgtgtgcggatttccttgaccgccacacggtacagccgccacagcgacgaatgctccaggcgctcggccaacagggcgtcgtcgtagtacatctccaggcgcgtgccgatctgggcgaattgctcgcgaaacacctcgttggcactgctgacccggctgaccatgcggctcttgcgcagcatgatgaaccacgactggaacatcatcgccaccagcaccaggatgatcacccaggcatccaccggcacggccttgagcaggaaccccaggctgccgaaaccgaagcccgactgttcttcatccacgccgtagaccaccagtttcgactcggcgccctgggcactggcgtcagccagcaacaacgtggccgggcgcgagaccttggacaggcgcaactcgtccatcgccccggcgaatggcaggtgagcaccggtcgcctgcggcacgtcggcaccgatggccagttgagtgttgaatgcaggcatcgccaccgcgaggttggcggtttcgcggccattcacatacagcgagattttttcaccctcggcggtgaacgccaggtgctgccattggccggggttcaacgcttgggtcgaaacggcgcgctggccgtcaacttccacaaacggcgtgccctggttcagcccgagcaacaggctgtgggcgccgtcacgccgggccagcactacctgctcgccactggcctggtccaggcgcagccaggcgctgaaggtgaaggcgctgccgggggcatgttgcaacgacgggctggccggcaacagcaatggctggccaccgaactgcaaggcgcggccaatcacgccgtcgatgctggcgcctgtggcgttcattgctgtgttggcgtaggccgtggtgtcccgtggcggcgtgccgttggcgccgtcaaagtggaagagcgcggtgtaattggggtcgaaggtcagttggccattggcggtggccgcagctttttgattgccgtagtacatccaaatgtcctggcgctggccgccttcgaccctgggcacatcaacccagatcaaggccatgcccatcagcgggtcgaagctttcgatctggtggttgaacacggtcttgtcgtcggcgctgacaaagcgcaggtcagcgccgtcgtccttcaccccgtcaaaggtgaaattgccggtgtgcaggcgcaccagcagcgcggtacggcccagggcctggttgatggcagccccttgggcggtggtgtccacggtgatctgtttgcggtaatgccaatcgtcctgccaccaggcatgggcggtggccgggagtgtgaagcccaggcagatcaacaggctcaggaataggcgttgcatgggtgaaatctccggaagaaaaggtcagaaagtcgcctgcacactgaagtgcaatcgcgagtcctgtttctgggtgttcggtccatcgagcagcgggtagccccagtccaggctgccggataaccctttgctcaagctggcgcgggtgcccaggccgacgctggccaggctgtattcgtcttcttgctcggcgagcggtttttgcaggcgcaggcgcgccccttcggcgaacgcgtagaagcgccactcctgcacataactgccgagaaacttggccagggacggcgtgcgcatttcctgggagaacagcacgccctcatccccggtgcgttctgccgcgaggtagccgcgcaccgaggtggcgccgccggcggaatattgttcgttggacaccagcggccccgaggccagctggaagccgcccttggacgcggactgccagtcgttgccaaaggtgtaggtgtaattcacgtcgcccttgagcaccgcgaaactggggctggccttgtagcgcttgtactcgaactccttggcgtcgctgccgtagccgaaaaacgcgcgggtgcccgccaccaggttcaaacccaggctcagggccgattgctcgcggtagcgatagccgttgtagccgaaggtgaatggcgcgtatttgagcggcacctggtcgttgttgccgccgagtttcagctgttcgtcgaagtccttgaagtccacgcccaaggagaacgaattggcccagctgtcactggccggcaaactgtaaatcgccgagacaccgtaggaatggcccttgcccagcacattgctgccaccgatggtggcgatgttgctgtcggactggtagccggagaactgcagcgtccagcgttcgtccagcggcgcgctgtacgagcccgaccagaccttggcattgctgctgtcctggggcgccgtgaaataggtcagggaaatgctgtggcccaactgccagaggttgtcgtaacccacgcttgccaccgaacgcagctccttggtgtcggcgctgtaatcgttgttcaggccaaggctggcgtgccacgggttctggtcttccacctgcaagtcgacgtccatggtccccgggcgctggccttcacggaccacgggcgtgacctgacgcccgacgccacggttgagcccggcgagctgggtttgcacgctggcaaaatccggcaccgcgccttccttcaggcccggcacttcctcgcggatctccaccggcgagtaatgcttggcgcccaccacgcgcacgcggccgaccttggtttcgctgacttgcaaatagacgatgccgtcatcgaccttctgctccggcagctcgacaaacaccgactgatagccgcgcgcctggtagattttctgcaacgcatcgcgggcgccttcgatgtcatcgagagtcttttgcgggccgagaaacggatacaccgcctcttcaatcgcggctgcatcgagcacggtattgccgcgcacgaaatactcgttgacgtccaccctgcgcgctgcggcctcgtcctcggcagacgcggtctggggcagtgcccacagcgtcaggcacagcgccagcgttgacttgaacagatgctccacaccgccccctggtttttcaaaaaagttgcgcgccttcgccgattgcacggcgtcaggccgtttcaattgctggtggtcgaaagatggctgtgccgggccagccaggtgtgcagcaaggcgaagttcaacgagaactccggcatgtgcagcaaggcaccgcaaaacacgtcaccgatgattttctgaacgagctgcaccgcacgcgggttgttcaacagcgtggcgatgtcgcgctgcaggacgtgaatgctccagaccttctgattgaggtccaggccgacgaaccagcgaaacagcaggttgtagttgagctgttcgtgcagttgctgttcgctgggcaccgagtacagcagttgcagcagcaggatctgcatcaccgtgttgggtgcgatcagcatgccgggttcgacctgaagccagtcgcggtgctgctcgagtacctcgtcgatctgcgggcgcagcaacaccagcgagtggcctgcggggatatagctggaaacttctttgcgcgcgccctgccagtcttcctgggagacgatccacacccatggcgcgccatagcggtagaccgaaaccggcttcttgcgcgcggcttcgacgatcttcgacaggcgctgatcgagctcctgcatgccgactttcgagtaacgttccatagttcccatatgccccactcctggcgtcctgctgacggctttggaggcgacatggggtcggctccagcgcgttacataggagagacgggagtgggtaggggctaccgaacttttgtcatgaaagcttcatttgggattgagtggggggcaatttttttggcgagacttattggggggatatccgttattcgggtgatggtcaatatgggttccgcccttacggcgggtcactttgaaaagcgcaaaataaccaaacgctcttgccccaacactcggcacctcggtctttgagttacacccagtagatgccatcgcaggcaagccagctcccacagagaagcagatttgtgcagatatttaagtcttactcggtcagaaatgtgggagcgggcttgcccgcgatgagggtgtatcagccaatacatttgccactgatctaccgctatcgcgggcaagtcgaatcgtcgcaccgcccgcgctgggttgcgaagcgaccctaaaagcaataaagcaataatgcccagccttcacccaaataacgaatatacacaccaacccaaccgcaaaaaaaaaggggcaatcaccgatcgccccgaagctacaacgagaggtccttacaaactgatctgccggcgctcctcatccgtcaaccgcgccctcgcctgttcactcaggggcccggcgcccagcacctggaccgggctgtccgggttgtacgccgaggtcttgcgctctggctcacgcggcaccgcctcggtaccaaaccccaacacctccaccgtcacaatcgacgccctgccctgcttcgccgccgcctgctgactgcgcgccgcctcttccgccgcctgggacgccgctgcgcccgccgcactggccgaagtcatcgcacccgtgttgacagtcgccgataccggcacaccggacgacttgccctgggtctgaatgttggccgcgttgaccacgcgcaaagccgcgatgttgacgttgcccgacacccggatacccgcctcccccgcatcgatggtgcccgccggggccaacaggtcgatgtcaccggccggcacttcggcgattggggccagggtggctatccccgcgccggaactcggcacattgggcgacaaggtcacattgccccaggtgtcatacacccgcttgggcggggtgtagagcacggaggttttcgagccgcggccggcgttgatgtcaccggcattggaccaggccagaatcgacccgccaaaggtggtcatgatgcggctctggccgagcaggatgctgccctgggcatacagttgaatatccccggccccttgggtgatcacgccggcactggccggtggtgcagtcccctcgataccgaacacttgctgcccgcccggtgtgagcatccggatatcgccgccaaaccgggtatgcacgccggcgccgccatacagggtgatgtcgccgtcatacgcgatcggattgcccgccacgtccttgcccggcaacaacccgtcgatggccgcacggctgcgtacaaagctgccggcgcgcgggcctgccgccaggttgaattcacggccgccctcgcgcacttcggcaaagtacaccgagcgggcgaaaatgcgttgctgctcagggcccaggccggcgaagtacgcgcgggcctggtcggcatcaccactgaaggcgtagcgttccttgagccattgcaacagttctgcctcgtaggttttcgccaccttgccggcctgcccggccaggggtacgccttcgacggcctgattggcgcggttcaggtagggggtgacgaacttcaggtaatccaggccattgggccccaccccggcttccagcacgatggacgcgcccggccgggagtctcccgcagccacaggccccaggctggtgatggaggctttgtcttccatcaacaggttgcgcccggcactgacttccagcgtgccggggccggcaacgttgaagctgctgtacacaatgtcgcgcccggccgacaccaccgacacatcctcagggcggttgtgaacgaacacattgccgctgctctcgccgctgtaattgccgttattgcccagcagcgcagggaacaccgtcggctgccccaggtaggtgcctgaactgacaatgtcacgccccgcccgcagccagcccgggcctgcagattcatagcggacctgcccctgccgagcgccgttgaacgtgatgatttcaccactgcgcaagccgacgatatcgccttcgcgtgcgtagaacctggccggctctgcctgcgcgcccgggcgtgcaaggtcagtcaggctgcgcaaggcaaacagggaaaagtcgtcctgcatcgcatcactgcccaggttgtcgatgacgttgccggggccgttcctgccgacaaaggctggcgcgaaaggcgtcggtatcgacgccaggctgtcaccggactggttgacggcgtagccactggcgtagatcgaatccccggccaacatcgccaaacgcccgttgctcgacggcgccagcaacagcgaatacgacggattgttgggctgcgggccaacgcccagcgccgacgcaccgaggtagatattgccgttggcggcgaccacgccgagtttggaagggaaaataaaacgcccgtcggtactcgagtaattctgcttcttcaaaggatcagcattgccacccgggctaagcgacacgctctgcacgctaggcgtcaagctgccgcctgcggagaacaggtcgatggcggtacgctcggtccacagcgaaaaccaggtggtcccattgccatagtcctggccgttgtaattgaaggcctggctattttcgctggagacacgcccagggtcgccagcccccgccaacaccaggtcaccacgggtcgacaggctggccgtggcgtcgcccagcatcagcgtaatcccgccggtggccgtgcccaggctggcggtgtagggcgaataggcccgcgtgtccttggcgtcctgattcccacggattccaccatagttcaaggcaatgccccccaggcttcctgcctgcaggttcaaagcaccgcgcaagttggtgaacacaccattgaggctgagggtttctgccttgaagtcgcctgacgacacactggcggcattcggtcgcgttgcacgcgcgtccaaccccgggttcaaatccccgcccatacgcacatccaggtcaccgccgcctgtgagcagcaattgcccgtcaaccatccgcccggtactgcccaccgccagcaccagcgcctcgctgcggggtgcccgcccgccgtcgggagaaccacggcgagcctgcatgccgccatcgctgcccagatcgagggtcaaattgccgccgcccaaagtgcccactcccgtgaaccccaccaggcgcggtagcaggtttatctgcgcaacgtcctcgaaatactggttggcaccactgtcgcccttcacgtaagtgccgaagttgacccaccaactggtcgggaggggcgtcacacccgccgtgttgcccgtaccctggcgccacagccagttacccaggttcgcgctgttgagttgcacacgaccgtcgttgggcatggcgttgttggtgagcggcgtccagacatcgccggtcaggctgccgcccgtgcgcagcaacacattgccgcccccgtcgggataccaggcggcgtaagggctgtttttgtcgaccaggctttcataggccttggccgcactgccaagtaccgtgccatccgccgcggtggcgcgagcccggtcgaagtcggcggcagcactgcctgcgcgcgaagcgctggaggcacccgcggtgtaaacaccgtagggtgattgcatcgacacgttgcctgcggcgatcaggtccaggtcccctgtaccggtgcgcagcacgctgaagtgctggcccacgggcgaaacctttttcacatcgccgatggtgatcttctcgggtatcgccggaaccggttcacccagggacacgcacaggtccgggtcactgcattcagcttcgtcctgaggcgaaaccggctggccgggaacaaagccgaagagctcggcgaggtcgctccacacatacttgacgcgaacacacatgtccggctcatcacacgagccccactcggactccggcaccggcgtgcccgcctcgacaccgaacagctcggcggcaaagtcactccagtaccaggccccgcccggccgggccggttgccccggcacgatgattttctcgtgcgtttcgtaaatgccgtagtgggtgtcagccagcgtcaggtcgcccgcaaaggccggctggatcgcccgcgtgtcggcggcctgggtatcggcacccgacaccagccgcagcgaccacgactgcgaaccctcggccagcatcggcgccaccgcccagttctggcgcgcagtggcgccggtcaccgtgcgcaacggcaccgacaccgcaccattgggcaacttcacgtccgtgccgtaaggaatcagcgcgcccaccttgagcgccaggtcgccggccagcaacacaccgtcggtcgcactgcccgtcacggctccccggctgggcaacggcacgcccgccggccaagtcatggcgcgcagcgaagcggcacccgccagcaccgtaccggcctccagttgggtaccggcggccagcaccacaggttgttgcagcaacgtaccggcggcatacagcacgttgccggaggcgtcgtgcaccgccgcgctcaacacggtattggccggcaaggtcaggggggcgtcgaggacaccccgggtcggcaacacggtgccctgcgccagtgtggtggcctggatcggcaatggatagttgagggtcttgcccgtagggaacgcactgccattggcgaggatcacgccagggccgggcacgattacatcggcgccgaagccttgcacgccgggcgtcaacacccaaccgttatcgtccggtgtcgcgggtggcggcgcaaagccgtcgttgatgctgccgtacacattcaggttgccaccggcacgcaccaccaggctgcccacctcgcccgagccgtacaccgaggtcttcggcgtgttggggttgacgctggcataacggaaaccggacatgtccaggtcgccgctgaccaccaggtcgcccggcgtgacgatttccacacccgggcgcaaatggaaggcctcgctatagcggctgttgttcaagcccgcgagcttgccctgcatcaacccggtgttgctcaaggcgttgttgataaaggtttgggcaaggtcgtgtttctgcttcaggtaattctggtcgatcacctggtacggccggccactggccgaaggggcggtgcccagcggtgcatcggtgtagcgggccaccgcgttgaccgcgatggaacgggcgccctgaacgttgatccgcccactcgcatcgatggccacgtcattggcattgagccgtggcgcgttcagctccagggtgccgcgggccacgccatcgtattgcccacggccactgcccaaaatggccgccgtgccatggcgcagatcgatgcgcaccccatcggccagggtcaattgcccgtcaccgctgttgagttcgaccactgcccggtttggcgcatcgatgatcttgccgtaactgtcgacccgcaacgctgtgccatgggcgtccagtaccgcgctgccggccagggtcaggccctgtttgccggccagacgaatgctgccgacccgctcgccactggcatcgacagtgcccaccaccgtcaggctgccgttatccaccgagacattaatctggttggccttgagttcatcgccaatcaccagatcgccctgcttgagctggaagctgcgcgaaccgaatacctgcccctggttcaagcgctggttcaaggccacgaaaccccccaactgccgggcacggatgtcaacgccaccggccttgtagggcaccagggtgccgccggcatcgtaatagccgctgctgccggcgcgaatctgcccttgcaggtcgacctgacccgcaccggcgtccaccgccacggccttgagcaaaccaccctggttgaattgggcggacaggtcgatcagcgagcctgccgcctggtgaatgttgccacggcggctttccaggctcacatcgccgccccagctgtatttgctcacatcattgagctgcaccttgcgcccactcaggtccaggcgtgaggccgcgcccagggtgagttcttcatcggcgctcaaggtcagcttgccgctgggcagcaccaccgaagtgtccacggccacgttgtgcccggccagctgcaactcggcgcccaaggcgtcaatagccgccgcttccaacggtgccgcgccgctcgccggggcctttaccgtcacgttgccaccggccgtgatacggttcaccgacccggcttcgccggtcagcaacggcgtgctgatgttcaggttaccgccgctgtaggcaaagcccttgccggcttcataggcaccttgggcctggtacaccgtcaggctgcctttgtggttggcggtgatgcgctcgctggcattgaggttgacgttggcaaagcccaacgccatgcgcccgttattggccaggctgtcgggctgggcatcgcggccatagccgaacgcgatacgccgggcctgcacttgcagggtgccgctgccggtgcctgcgccaccgctgatcacggccggcggtgcactgacgtcgccgccccacaccagggtgccggtctggatcagcgccatgtcgttcgcggcgccatacccatagattgccggtgtggtcagcagcagttcatcgagcagcgacttgcccgaactgtcgagggtactgaggctggcactgccgtaaaaattcaatgattgcccggcggtcagcgccaggctttgcagggcgggcgcgccgttcgtggtatcgccacgcagcaggcggtccagcacttgttgattaagggtcaagcccgacggcaacacgccacgcgcggcggcgtctgccagtgccgccgtactgccgacgttgatcccgcccaccgccagtgccagatggcgggtgccgtagcgtgcgctgtcgtccagagcaaaacggttggtggtggcaaaaacaatcgagccctcggaataaagcgatgtatcaccgccgcaagcacctggcttgcattggccgataaggatgctccccggcccgataaccccctcaccgttgaccggcgccaacatctgtaaacgcccgttggagacggccaacacgctgcggttacccggccggtagataaaaccgtcatccgagtcgtaggccgccttgccgcgccccagggtattgatcgatgcaccgctctcgacttcaatggcgcccccgggcctgcccgacaccaggaacacttccggcgctgccagggtcgcgccttggcgcacggtgaccgaactggccgtggtggccgccatgtccgacctgacaaaattgccgccctggccatacaccaccgtcatttcaccgcccaccaccaaacgggcagcccccaaggcgttcaagtcactcgcccgtaccgacaccattgacccggcaacgctggcctttgcagtatcggaaagcacctcgatgtcgccgccggacaagaccgacacagtggcaccaaacccgccttccgccggtttgaaccgcccctcaccgtcaaagctgaaccccaggtctttttggccttccaccagacgcaatttcagggttttggcgtcggcttcaagcgccgcgcgtggcacacccagtcgggcagcatcggcccgcacaaagtcggcgtaggcggtttcgttgtactgggaatattggcgcaatacagcggccggcgtgacgatcacctggctcgacaaactgtcacggatgccggtgccggcgactgacaacacgccctcggttgaccaggaaccgttgttcatgaccgaggcgccgcgcatcgagccgctggcgagcggcgcagccaacccattgacttccacccgaaacgcccccggcaacaaggcgtaagtggacggcagcaaggtgtaggtgcccgccggcaggccgggaacacccgccccgatagctatttgctgcccgaccagcggctgcgtcgcccccgcttcccccccactgggcgccacgcccggctggtttccgggaacaatcgcgtagatcgggttggtggccagccccggcaagctgaagcgcccgtccgcgcccatttgtaccaaggggttgtagcgcgcatcggtggagccgccgcgtccggaaatgaacgctgcgccgagcaattgcccaccgccggataggtccagcaccgcatcttgctgcacattcagtgaacgtcccgccagctccacacccaccgccatattgccggtgctgcgggtgccgccgacgcccagcagttccacctgctggccgtcgtatcgccaggtcacaccgtcgacggttccgccatacggcagcaccagcccaccggcgctgacggaggtcaggctgcccggcagcaggttgatcactttggtcgtgcgagtgatgcccccgtccacgcccagggtgaggctgcccatcggcgcgcgcagcacaccgccctgctcaatggtcgaggcgttcagcgacaagctgccaaacactgagtacggttgcgccggcgccgtcgtgccgacccggccgatgcgcaacgtacgcgtcgggtcgaagtcgcctccggtgttgccggccgtcacctgtgcaacggcaccggtggccggataaatctgcgcggccacaaggtcaaggtcggcctgggtggtcagggcggttttagtcttgtcggtgctgcgggccagaaagcgcatgtccccctggctgatcaactgcgcctggtcaaaggcacgtcggtccactgcgttggccaacgccttggtgcgctcggcatgggcgccgaagttgacgctgtcacgcacatccagcacgttcgcggcctcaaccctcaagcttcctgccgagtcttgtgtggaaaccccgccctggaccgtcgggcgcaccgcgctgtcggtaccgctattgttgttaccgaccccggccaggcgcacgtagggtgccgccagcaatacgcgggactgccgggctgcaccatcggtcaaggccagggcacctgaatacaggctcaggctttgccccattcgcagcgacacgtcgccgtcgaagctgatcaaaccattgctcagcagcgacacattgtcgaaaccaccggcgttgacctggctgaccgtcaaccggccgtggccgtaagccaggccgcccgccaccgcatcgggcgtgctgcccgccggtaacggtgtgcccgaatccgcggcactgacgatcagctcacgggcctggcgcacacgggcagcggccgagtcgacgtacaacggcgcttccaacgcaacgttcaggctgccaccggccgcaccggtgccgccgctgttggccctgaacgaaccgtccaggtaaaggccattattggaggccagagaaatgctgccgccacggctggcgacaacactcgaacccgcatcggccaagtccagcagcgcctggctgccggaggcgtccaggcgtgcaccttcgcgcaccaccacgaacaggttggcggcactggcaatgccggtggccgggtcgatcacgccgccgatcacgatagtgccgccctgccccacaaggccgtagcgtcggccaaggctgtcgacagccgtcgccgcccgtgcggccacatccagtacggcgtgttcacccacccagatcgagcggtcgtgccccttggcctcaacaccatcagagacgccaggctgcacagtgacgccgcccagggtgatgttgccgccccaggcattcaacgtaccgtccacggtcaactggccaatactgcgcacgctgatggactggcttgggtcaacgttgatcaccgcgccctggccgatacgcgcctgcaccgtcgccatctgcgcggcggtggacagcgcggtgccggcctgcaggctcaggctcgcaccttgacgtgtggtcaactgatgccgggtggggttctcacggtattgcggtggggtccaggcttgcaatgccgtgcgcgggtccgcgccgctcgccacgttttgcgcggcgtcattgaggcggtacaccggcgcagtcacattgacctgcgtcccgtcggcgacgagcaaaccttcattgccggtgatgtcataggcgccgaagcccttgttgaagaacccgctgcccagttgcagggtaccggcccggggtgcggcagcttcatcgctgatcaacacctttccggcctgcacactcaggcgcccgccgccattgaccccatacccgagcaactcgccattgagcaccaggttgccccggctgtctgcactgtttgcgttcgccgccagcgtcaggtcgccgcccttgccgccgatcagctgattcctggcatccagcgccgcaccggaagagacgtccacccggctgcccgccgccattgtcacatcgccgctgctgcgcaaggccacgcgaccgccgttgaggtagggcaaacggctgccatcgtccacgttcaacagctggttgctccacagaccgcgagtgtccagggacacgccgctgttgaccgtcaagctgccacgaccgcccagggtcacgtcgttcttgccggtcggggtgatctgggtaaggacgttgcccagttgcaggctgccggaatgcgcggtgaggttggcattcacctccaccttcggaccgtacagcgtgatgtcaccggccggggccacttccagtgcgccattgaccagaatcgagccagtgctggcgatattgatcgcccccagtttcgccgcgttcaaggcgtcgttgtccagatacagcgtggccacccgctcggccggcaacacgctgttcacgtccagcccggcggcaatggccgccgcgcgcggccccagcaccacgttcttcaccgtgttggcatccgcgcccagggcgtactgtaattgcgcgctgtccttgacgtaatacggcacgtagctgccgaccatcaatgcggcgccacgggccacggctttttgcgactgcaggtaaccgtccaggcccttttgtgcagcctgagtctggcgatcgccctggtaggtgtcgccgacaatctgcccctccagcaccgcgctggaggtactgacgaccaggcgcccggcatcgcggcccacggtgtaaccggcctcgctgcgttcacggggtgcgatcaacgggttgtagtaatagtcggtcacgccccagcgctggctgtggtcttcgtaacctttgtagatcccgctatagagcaggtccccgggtgcactggacagctcatacaaacgcccgtccgggcctttgagccaggtttgcttgaccttgcccgcctgcacatcgagggtgccgcccgacaggttgatctgcgagccgttttgggtgaccacgtccttgccgctgaaggtcaccgtgccgccctgggccatccactcgccaatgccatggttgcgggtgcccagataaccgcccacctccagcaagccgccggcggtgtaccaacggtcagtggcataaccgttggtgccggccggtacaaaaatcaggtcgcgcacatccacccacacatcgttgttgttgagcgccttgctgtcacggttgcccgccgcatcgcgctgctcgttgccctggatgttgaccttgacgctgttggactccatcgccaacttgaccccgatggcgccggagacatcgatcaccgcgccgtcgcgcaccaaggtgcgttgcgcggccttgacgcccaccaggccgccggtggccagggtcaacgagccgttgcgaaaatccacagtgccgtcgctggtgatctccaccagggattggtcgcggcggtagaggtcagccggcaccacgttgccggcctggtcaaccgacggcgtgagcaacccggcacgctggccgtcaagggcattgctggtgtcgagcacaatcgcgctgaggctgccctcgcccaaggtcacgctggcgttgttccccgtgcctttcaaatgcagcgtgccgcgggcgtccaccgaggtactggagagcagcacaccgctttgcagcacctgctggccggtcagggtgatgtcaccggtggaggcctggatcaacccgctgttgctggccttgccgctgcccatgacgctgacttcattgccgcgcgtcgtggacgtgacattaccgtcggtgctgtagcccttcttgatcacaaagctgtcgcccgccgccagcgtggtctggccgcgcgcggtggaaatgctgccggcgttctccacctctttgccgagcagcagcacataaccgccaccggcggtggaggtggcgggcacctgggtctggatctgcgcgccgcgctcgaccgtcacgttgcccgcggcttgagtgaaactcggtgcggtattacttgagctgtacaggcccctggcggtgaactgctcatccgtgaaccccgtggccgccgccaccagattacgcacgttaacctggctgctaccgctgaacaccacgccgttgccgttgatgatcatcaccgtgccgtcggccttgactgccccctggatctggctcggcgcagtgctgttgttgatcttgttgagcacagcccaatcgctgttctgctggaactgcacggtggtgtcgcgacccacgttgaaggtttgccagttgaggatcgccttgtcggccgtttgcttgatcgacaccagcgttttgccgttggcgtcggtctgcaccggcccctcggcgttgacgaacagtggcttgccgtctgcaccgatcaccgcgttcaagccattgccgcccaggccgttgtgaatggactgcggccctgcactggcagtgcttctggccgccgcctgcgcggcctgttgcgcggcaatcgccgccacgctggtgttgaggttttgcagggagcgttgtagctgctcattcccgcgctgctgctgggacaacggtggcggcgttcccggcgctaccacacccgggcgtgcagtgccggcagcctgcgccgcgcctttggcggcaaaccagcccgaactgaacgcctgaggctgcgccgcatgcgcgctaccggctaacaccagcagcgcaatgacctgggccaagggtttgaggagcaacacttgacctgcggtagcaggcaccttggcggcgcggttggcaggcagcttcagtcgggaacgcatcacttacaggtccttttgacggggcaggcgaacgacgggcgcgcaaacactgcgcggccacgtgttgtggttattgcttaaggcggttgccggagggcgcgaccgaactgatgtcacacaatgttcatgtgctgcggttcaactggccggtccggcgggaaaacgacaaaaccggcaatgacgcgaagtcattgccggtcgtggtgtcaacccggtcgagacggggtcttactgcggacgaccaatgccgttgcagacgttggtatcacccagacgcaaggtgctggtggtggcgtagaagttgtcgtggacagctttctgccaggtggcggacaacggaatgaacgagtggctgctgaccgctgcgttgttcacgccggtgtagtggcggttcaggaagttacggatacgtgcggtgtcggtggtgtctttgtagcactggctgaacaccaagttggtgtagcccacgatcgggtagcctgcagtcgggttggcaaacgtcggcacccatttcaacggatccttggcgtcattggtgcccagagccggtggcgcaacagtatcgagggtaacttgcacgttgacttcggtaggcagtgcgccgttgatcgaagcgacagcagaggcgtcgttgaactgtgcgtagtccgggctgacatagccgatggcgccgttgttgttggcgtcggcaacagcggcggcaacaccctggctgccaaccacgccgatgtagttggtaccggcaggtgggttgacggccgggttgaaaccgacagccgtggcgaagctgttgctggcagcaggcaacaacgtaccgctgacggccttgaggtgagtcgtcagaatttcggtagtgccgctggtttcagtacggtaaaccactttgatcggcaggttcggaccggcaacgccgtcaaacaacacttcgttccagtttttagtcacaccggcgaagatgttggccagctgaacgctggtgagtttgagcgaggttttgccattgatgtggtaaggcacagtcaccgaagtggctgcagccggaacctgaatcagtgggccgaaggcggcgctgcccttgacggtgtcagcattgtaagcggccagttcggtagcgctgacgatcgagtcgctgcctgcatagtcaacgttgatgccggcggccagtttcagcttggtcgaatcgttaccgaagaaggccttcttgccgtcgccgctgccaacgccgatgtaggcgttaaaacccgggatggaggacgcgaggatgccagtaccggtcgtggtgccgtagagtttttccggcagggtggcaccgccgccgaccactgcggccatggattgggccgaagccagtgctgcaaccgccaaagaggccgcgatcatagtgcgcttaaacatgaagaatctcctttcgtcgtgtttgtacgtttggggtagatggctcttgcatgacgccatggctccggtcccaagccgtgttccgggggtggcgaggggtgaggccatgggtagggaatttcgcagcctgcgatgacagcaaaaggaaaaaacctcgggaggaagcgcttgattttgaaaaagattctcgggtgtttcggtcatggttttgagcggttttggggtaggtgacagcgaggtttcagtgggtggggctggaggccgtatagaccttgggatgtgacggaatgaggaacccgaggttgaacgggagtacccaacatttactgaaaacacacagaacccacattttggattgtgtttcgccagtcggtcaggtgacgagttggttgatctcgatgatgggcagcaatacggccatgacgatgacgagcaccacggcgcccatcaccacgatcatcagcggttccagcaaggccgtcatgcccatggcgcggcgctcaatgtcccgcgacaaggtctgcgcagcccgctcaagcatcggcggcagcgagccggttttttcgccgctggcgatcaggtggatcagcactggcggaaagaccttttcctgcgccagcgccggggccaggttgacgccttcgcgcaccttggcggtggcgtcgttgacggattggctgaggcggtcgttggacaacgtctggcgcgccgcttccagtgcgcgcagtaacggcacaccggcaccgccgaggatcgccagggtggaggcaaaccgcgcggtgttcagacccagcacgaaacgcccgatcagcggcaaacgcagtacgcgactgtgccagttcaaccgcgccacggggttacgcaggtagaggcgccaaccccagaaaccacccacgatcccggcaaaacacaaccagccccaggcgcggatgaaatcactcgcgttgagcatcgccagggtcagccccggcaaatcctgacgtgcctgggaaaacgcgctgaccacctggggcaccacgtagctgagcaggaaaatcacaatgccgatggacaccagccccaccacaccggggtagataaacgcggtcatgatcttgccgcgcaaattgttgcgttcttcgatgtagtcagccaggcgctccatcacctgggccaggtccccggactcctcccccgccgcgatcaacgcgcggtagatcgacggaaaatcccgtggccgtgctgccagcgcatccgccaggcgcatgccgccgcgcacatcggcgcgcacggcgctcagcgtctgggcaatgtgttttttctcggcttgctccaccgttgcactcagcgccgcttccaatggcaagctggcaccgagcaggctggccagctggcgcgtggcccaggccaggtcgttgtccgacagcttggcgctgaacaggctgctgccagccgccgtctgctgctgaccttcgattttcaccagcaatgcggtcaggcctcgaccccgcaaggtggcaaaggctgcgctctggctgtcggcctcgacatgccccgcctcgattttgccgctggcatcggcggcctcatagcgatagcgattcatcaggcgtcccgtgtcacgcgcaggatttcttcgggtgccgtggcaccgctgcgcacccagcgctcaccgtcttcacgcatgctgaacatgccggcgcggcgtgcggcgagacgcaaatcctgctccccggcgccgttgtggatcaggctgcgcacgtcatcgtcgacgcagaacagttcatggatgccggtgcgcccgctgtagccgacctggttgcactgcgcgcagcccaccgggcgccaggtgccgggcgcggccgggtcttcctgtttacaatgcgggcacaggcgccgcaccaatcgctgggccaaaacgccgagcaacgacgaagccagcaggaacggctcaacgcccatgtcgatcaggcggttgaccgctgacaccgcgtcgttggtgtgcaaggtggccagcaccaagtgaccggtgagcgaggcctgcacggcgatttgcgcggtctccaggtcgcggatctcgccgatcatgatgatgtccgggtcctggcgcaaaatcgcccgcaatgcgaggccgaaggtcatgtcgatcttggcgttgacctggatctggctgatgcccggcaggtcgtattccaccgggtcttccacggtgaggatattgctggtgctcgcatccagccgcgccagcgccgcgtagaggctggtggtcttgccgctgccggtgggtccggtgaccagcacgatgccgtggggctggcggatcagcgtgtcgaggcgtgcgagcagttgaggctccatgccgagggtttccagctgcaagcgcccggcctgtttgtcgagcaggcgcatcaccacgcgctcgccatgcccggtgggcactgtggacacgcgaatatcgatgggccgcccggcgacgcgcaaagcgatgcgcccgtcctgcggcaagcgtttttcagcgatatcgagctgggccatgatcttgatccgcgacaccagcgcgccatgcagtgccttgcgcggtgagacgacgtcgcgcagggtgccatcgacgcggtagcgcaccacggaatgggtttcgtatggctcgatgtggatgtcgctggcttcgtcgcgggcggcctgggtgagcaaggcattgatcatgcggatgacgggcgcgccgtcctgggtgtcgagcaggtcggtgacttcaggcatgtcttgcatcaggcggtcgaggtcgacttcattttcagccgcccccaccacggcggcggcgctgccggtgtcggcgtaggcgctggtgagcaggcggtcgagttcatcgtcgcggatgtgttcgagggcggtgtggccgaattggcgctggacctcgctgatggaccagccgggggttgaagggcagatggtcaggagcatgccttgctctgcggggcgcaggaggatgcggtgggatttggcccaggtgtaggggagcaggctcatggggtgtttcctttttttccgcgtgtatatccattactgcggtaacggccgcttagggttccgcccttacggcgggtcactttggaaaagccccaaagtaaccaaagggctcttgccccaacactcggcacctcgctcaggctcggtgtgcccgtaatccgacagggatttggggggccgccgccacgcgccatccctggcgcgtcgcggctaaaccggcatccctgccggtttaccccccaaatccctgtcgaattccggccagcgtgttttaacggggcgctcaagatccaaagccagatcaaaagcaagatcaaaagcaagatcaaaagcaagatcaaaagcaagagcacggcggcctgacagccggcctgagtggttagatcaaaagcggttaaatgtgggagcgggcttgctcgcgaagagggagtgtcagcagacacatatgccagctgacccaccgcattcgcgagcaagtcgaatcgtcgcaccgccgctcccacatttggatctccatgcatcaggcaaacaccgatctgctcttgatctgcttttgatcttgatcttcggcgccccgttaaaccacgctggccgaacgcaggctttggagcgtgggcaacccggcaggacgccgggttagccgcgatgggccagggatggcccatggcggcggcccacgctccaaagccggagtgagggcacaccgagcctaggcgaggtgccgagtggtggggcgaagaccttttggttacttttgggtctttccaaaagtgacccgctgtaagagcggaaccataggtggccgttaccgcaccaacggatatgtactcactcactgaggcaccgcccgaatcaccgcccgcggcccccccgaaggaatcgccttctccaccgaaggcaactgcggcgcctgcacatccggcatcgcccaactgcgctccggctgcaacccaccctgcgcccggcgcatgaactcatagcggttcaacgtaatgctgcgccccgctccactgtcgcgaataatgtaaggccgcaaaaacaccatcaaattggtcttcgtcacactgcgcttttcattgcgaaacaacgcccccaaccccggaatgtccgagagccagggcaccgcgtcattgctctggctgtagccatcctgaagcaacccgccgagcaccatgatctgcccgtcatcgagcaaaatactggtatcgatcgcacgcttgttggtcaccgtcccggcatccaccgaggcccgtgggtcaacgctgctgacctcctggtaaatatccagcttcaccgtgccgccctcggaaatctgcggccgtacgttgagcttgagccccacttcttcacgctgcacggtctggaacgggttgttgctggtgcccccgccgccggtcacgtagctgccggtgacaaacgggatggtctgccccacaaaaatgctcgcggcttcgttatccagggtcagcaggttcggcgtggacagcacgttggtgccgcctttgctcttgagtgcacgggccagcaccttgaggtcgagcaccttgccgataccggggatgtccaccgagccattgaccaggccaatgttcaggcccttgggcaacacgtcaatgctggtcttgctggtgggcgtgccattcaagccactgccgccgaggttgaccccgccaaagccccccttgccaccgagattgcccgcctgccactgcacgccgaactcactggcgtcgtcttcgccgacctcaacaatcaggctttcgatcaccacttgggcgcggcgctggtcgagcatgtcgatcacttcccgcaggttgcggtacagcggatcgggcgcggagatcagcaaggtgttggtggtggcgtccgcctggatcgtcaccccaccggcgctgaacgcggtgttctgttcgctgggggtgctgcccgtggaaggcttgtcctggctgtaactcgacggcacgccactgccggtgggcgtaccgctgctgttctgggtgttgctgttctgcgtgctctggctgttgccgcccatgctgctgagtttgccacgggcctcgtcgctgacccccgactcgctttcgccggtcaacagcccgcgcagggactgggccagcttgcccgcctgggcgttgcgcaggtacaccacgtgcatgttgctcgggttgctctgggcgttgtcgagtttgtagatcaggttgcgcgccagctcggtccgctcagggctgcccgcgcggatgatgatcgagttggagcgcgggtcgcccaccacattgatcttctgcgtctggtcggcgccctgggtttccagcagttcggcgaccatggcggcgatgtccacggcgatgccgttctgcactttcaccacgtccgtgtcgatggcgctgggcgtgtcgatgccgttgatgatctgcgccacgcgcgtgaggttttccgcatagtcggtgatgacgatgctgttgttgcccgggtaggcgttgatcgggttgttcggcgacacgataggccgcagcaccgggatcaggttgaccgcgttttcgtattgcaaacggaacgtgcgggtctgcatgccgctgctgcccgcgctgtagatgggcccgccgagcagcttggcatcggcctccggcaccacttgggcgacaccgccgacgtcgaccacgctgaaaccctgcatgcgcaacgccgccagcagcatgtcgtaagcctgatgcgccggcacctgcccttcgctgaccagcgtgaggttgcccttgacccgggggtcgaccaggaactgctggccggtggcgcgggacagcgcacgcaccaccgcctggatatcggcatcgacaaagttgagctgcaccggctggtcacccaacgggttacgcgccttcagcggcgcaggggcgtggccgcgtgcgctgtctgtcacggggtgctgcacacggggcgccggggcgggttcgcgctggcggtcaaaaaccggctcatccctacggcgggtatcagccaaaggctggcccagttcactgtccaccagcaaaggcttggtcgattgcggcgtactgcacgcgctcagggccagcaacagcagcggcgcgaccttgcgaaacggcgcggggttggggactgaccacatcatgaagcttccttagcgccaagcgcctgatccatgcgaacggtcccggacacagtgccggccgagttgtcgacggcgccctcggcacgctgcaaacgcgcctcggacacttccagagaaaacgaacgggggttacccaacaaccagccgaccacggcatccgccggggcattgtcgaaggtcagccgccagccgcccggggccagcgcctgcaactgataacgcccctgcagcccggcattgtcgagggcttggcgcaacgtggtttcgtcagcctggcgcggggcggcgctgccctgcaacagcacctgcagggcttcggcctgggcgcgtaacttgggggtttcgacttgccagtaatcgatctttttcaacgcgggctgcaccagcaccagccagctcagcaggcccgccagtaccagcccggcaccgctgagcatgcgtttttcgcgcaaggccaggccgttccagaactgccgggactggctgcgtaaacggtgccacttattcatcgccggcctccggcgcaacagccatttcagcggggcccagggtccagccctgttcgtcacgggcggcactgaaaccggcctctgccaacgccgcctgccaatcgccgtcaaccgccgggttgcgactgtcggcagacaagccaaggtgcaggcgcccctgctcgaacgtcaggttctccacgctgcccaccatgaacggcaagtggttgccggccagttgcaacaggcggctgaagcgttcgccggggtctgctgccgtaccggcctgccgcgcggccaattgctggcgggcctgctgcaaagggttgagcaccaccggcaacgcgggaaacgcctgacgcacttgctggctcatcagggccttgaggcgcaagccttcgtcggcctggcgcgcagcgtagaggttgaggccaagggcccagatagccgtcgccacggccacacacgccagcgccctgccccatccgccggttgcccgttggttgagactactgtgcaaaccccacgcaggagcggcgccgctccaacgctgcggcgcatcgacgagctgcgcatccagttgttcgtccagggcttgctgccccagcgggtgcaccgcgccttgttgcaggctgtggcgcgagagcaaatagccgtcgtgcaaggccgccgtgcccaccggcaaggcgaacggcgccgggtacaagccacgcaaggtcagcggcacctgcgccagcacctggcccagttgtgagagcccggccttgggcgcccaagccacctgcacgcgcccgtcgctttcacgtgggccgtgggcgacttgcatctgttccaccgcaccgaggatcagcgcctgcgcggcacactccacggcggcgacggttttcgcaggcggcagtggcggcagttccaggcttgtgagcaggctgtcacggggatgcaaaaaacagtctgccgcctggcgctttttgcccagctgttgaaaaggcacctgcccttcggcgaccactacgccccgctccagccaggcaaatgtgacaacgctgtcgaccgtcagttgatcaagcggcggcaaaccgatgcgcaagcgcttcatacgcccacccgcgaccagatgacccggggctggcggtcttccggccggtgcaccagcgcgtcaatcgtcacccggcgttgctcgcgacgggcctggccctgcaagcggaaccattcgctggtgatgcctacctgtatcgagtccaccgccacctggggcatgcgcagccggttgacgaaatccccgcggttgatgaaccagtgcccgctgtcacgctcggccaccaatgcctgggcctgcggcacgctgagcgcgggcacgaccgcactgagcacttcggcgctggccgtgttgccattgacccaggtattggcgggcagcacgctgatataagcctgcatacgccgcagcaaaaccgggtcaagcccattgaggcccgccaggtcatccaggctgcgcagcatcgggtatttggcgggcatatcctgttgatcataagaggcgatcacgcgctggctgatgcgccggctcaccgccggggccacgccaatcaagccgcacaggcgctcgaacgcctgtaattgctcggcatccgggcgctggcgattgaccaggttgcgcaggttgaacttgccctgctcatccatcaatcgcccttcaaacgcgccactctgggcacgggcccaaggctggtcgaggcgggtcaacacgtctttctggcgtgcgtcccagagcaattgccggctgtgttccaacccgccctgcagcaaccattggccctgcacacgcagttgttcggcctcaaggctgcgggtgaacagggtctggcgcgtgagcatcgcgccggcgatcaccgccaccacggcggcgatcagcagcgcgctgataatcgccatgccgcgctgcttcgccgctgcgggcgaataccctttcatggccggccttacaactgccaggagccgatgtcggcattcacgccgtcgccatccggttggccgtcggccccgagggagaacacgtcgacctcgccgttcgcgccggggttcaggtagtgataggggttgccccaagggtcattcggcaggcgctccaggtaggcgcgccagttgctgtttttcgcatccgccgggcgctccaccaacactttgaggccctggttcatgcttgggtaagtgccgtggtcgagacggtacaacttcaacgcctgcatcaggccgccgatgtcctgttttgccgccgtggcccgtgcctggtccgggcggtcaagcactttgggcaccaccatcgccgccaaaatcccgaggatgaccaccaccaccatgatctcgatcaaggtgaagccacgctggccgcgagggcctggcaatggggacgttaggcgcgcgatatccatctcgacattccttggcttgagtgcaattcgtggcgcagtgttgcaagaacacatgtcagtcgtattgaaaatcctcgggaggtttggtcgccaatcggtcaactcgcggggctagtctgcgggcctgtttccgggctttgagaacgccatgcgcaggcctcgcaaggagcaaggttttaccctgattgaagtgctggtggcgctggcgatcatcgccgtggccatggccgccgccgtgcgcgtggccgggttgatgacccagagcaatggcttgctgcgcgataagtccatggcgttgctggcagcgcaaagccggctggcggagttgcaactgggcgggcgtataaacagcggcaaaaagacctttgagtgcgatcaggggcggctgaagctgcgctgcgaacaaaccgtcagcgccgagggccgcctgtttcaggtacgggtgctggtactcgacgccagccgcgacgcgccgccgctggcgcgcctggaaacacaggtcatggccgagtgagccggggcaatgcgggcgcatccggcagtttgtcgaggttgacgcgttgcttctcgccgccgcgttcgatctccacggcgtcgccttcgatggccgtcaagcgcacgccggggccgatgcgttcacccagtagaaaactgcgtggcgggccgtcgttgaggctgaggatcgccaccgcgccgcgggcgccagccagtacgccggagactttgacctgcaacgccgtgggcgtattggaaaaccactgcaacgccgggttatcgctgcgcgccgccagcgcctggggcgtggcttggggcgtacgggattcggcggacgtcagcaacagcggcgtccagatcaccacaccggccaccgccgcgagcaaggccgcaagctgcacgccgtgggcgggtgaaaaacgcgggatgaatgccatggctgggacctcctgtttgtccgggccttcaggctacaggccaattccaacgtttttatgtcacaacctcgccagttcagcaggtgccttacgatgaaacagcaaggcttcaccttgatcgagctgatggtggtgctggtgatcatcggcatcgccagcgcggccatcagcctgacgatcaaacccgacccgctgcacctgctgcgaaaggacgccgaacgcctgagccagttgctccaggtggcccaggccgaagcccgcgctgacggccgcccgatcaccttgcgcaccgacgccaagggttttcgcttcaaccgcaacagtgatgacggcctgggcgtcgagaccttcaagggcgacgcgcaattgcatccacgcccatgggaaagcacaccgatgcaaatcacgattgagccccgccaagccctggtactcactgccgaatggatcaacccgccggtgcgtgtggtgctgtccgacggccaacaccgcctcggtgtgcaacgtgatgccgctggcctgatgcgtgtggaaaacctgccatgaaaaccgctcagcaaggcttcaccctgatcgaagtgatggtggcgatcatgctgatggccgtggtcagcctgatcgcctggcgcgggctcgacagcgtgacccgcgccgatcagcatttgcaggccagcaccgagcagaccgaagccctgctgcgcgtgttgaaccagttgcagcgcgacatcagcttgcgcgccagcgtcgaactcaacgccccgggcatggccgatgaagacgcggccaagcccgccgggttggcggccgtgactgtgcgcagctccgacaccaaggggtttcgcctggaagtgattcgcagcgcgcctgcctccggtgcgggcttgcagcgcgtacgctggtggctcaagggcgacaacctgtatcgcgcggcagcgcctgcacgggatcgttttccgctgccggccgccaaggacggcgtggtcgtgctcagcggcgtcagtgacctgcaagtgcgagtgtgggacaccgataaaggctggcggcagttgagcggcaaccggcgcgaagacccgctggggctggaaatcagcctggtgcgccagacgcctcaaggcgtggaacgttaccgccaggtgttggggccgttgaattgacgcaatacggggccttgaacatccagcggttatgcctgagtctagcgctgccaccctttcggagcaccgcgccatgacctcgcctgccaaccctgcggccccccgtttctggcgcgaccccaggctgccgtttatcgaagcacgggccatcgccgacgggcgcaaggtcacttacggccgtcatgcccatgagcatttctccattggtgcggtcaccaccggctgcagttattaccactacggcgcagacaccttcgagatcagcgccggcacagtggtgctgatgaaccccggcgatgttcacgcctgcaacccgatccgcaacaggccctggtcctatcagatgctgtacctggacacccactggctgacggacttgcagcaccagttggggttcagcaccgaccagggttatcggcccttcaacacgccctacacccgtgacgagagcctctataacggcttgctggagttgtaccgtgtgttggtggacgaacacgccgaacacctgcaaaagcagagcgcactggtgagttatttcagtgacgtgcagcagcgcctgaacccctccgaaatgccgccgcgcgaggtcaaccacaagctggaacgcgccgccgagtacatccgcgagcagtgcagccagccgttgaaactggaggacatttgcctggccgccgagctgtcgccgtcttacctgatccgcgcgttcaaacagtattacgggctgacgccccacgcctttctggtgaaccagcgcgtccagtttgcccgcagccagctgcgcaatggcgagttgatcgccgacgtggcgctggccgcggggtttgccgatcaggcgcacttgcagcgcaccttcaagcagcatttcgccgccacgcccgggcagtaccgcgacgtgctcaagccatcagcaaataacccacactggccaccagcaacgcggccattgagcggttgaacagccgcacgccctggggattacccaggtaacgccgtagaaaagtaccggcatacgcccagcacgccaccgacaggtagcagatcaccaggtacaacgccgcaaacagccagacctggcgagcgtcgccgtcggccacaaacaagcccatcccggccacacacgccagccacgctttcgggttgagccattgcatgaccgcgccatacagcatcgacggcgcggtggccgtgccgtcggcgttcaaccggccatcgtcggccgccagtttccacgccatgtacaacaaaaaggccaccccgccccactggatcaactgcgtcagaatcggccagcgcaccagcacctcatgcaggcccaggccgatcagcaccagcaacaacgtaaagccaagcgccgcgccgaaaacgtgtttctggctggcggcaaaaccaaagcgcgcaccggcgcttaaagcaaccacattgaccgggccgggggtgatggaggtggcgagcgcgaaggcggccatggagaggatcaggctcattgcagttccttttttattcgggtgaaagacgatgggctcacggtaaacagcaaacacgggggcgtattgaacaaaatcaccctgggcgaatgtgtgcttcacggcgctgatcgttttggcgactctgggggctggcgacaggtgctttagaagtttttattccattgatatagcttaatttttttctgttaaaccgcctgttccaataggaaaaaatgcgtatttcccaggcaaaaggcggtgctagagttccggccctgctcacttctcattgatcactgcaataaggaatcgccatgtcacgtcgcctgctggcagctgcctgcctgttgttgtctttctctgcggcccaggccgccgagcgttgggaaaccttgccgccaacgcctgccccgatcgccggtgcccagaccggctacgccgccgtaaacggcatcaaggtctactacacccgcaccggccacggctcgccggtggtgctgttgcacggtggtttgtccaactccgattattggggcaaccaggtcaaggccctgtcggccaaacacacggtgatcagcctcgatagccgtggccacgggcgcagctcgcgcaatgaacaaccttacgggtatgacctgatggccgacgatgtagtggctgtgctcgacagcctgaagatcccgcgcgccgacatcgtcggctggagcgacggcgcgatcatcggcatcgacctggccctgcgtcacccggaccgcatcggcaaggtgttcgccttcgcggccaacacccagacctccggggtcaaggatgcggtcgagaaaaacccgaactttgccgccttcatcgaacgcgcgggcaaggaatacagcaagctgtcgccgacgccgaaagagtacgacgcgtttgtcgagcagatcagccacatgtgggccagccaaccgaactggaccgacgcgcaactggcaagcatcaagacgccaatcctgattgccgacggcgaccatgatgaggcgatcaagcgcgaacacaccgagtacatggcggcgaccatccccggtgccggcttgttgatcctgccgaacaccagccactttgccttcctgcaagacccggcgctgttcaacgcagcggtgctgaacttcctcgacagcaaatgaagccggttgcacctatttgacgaacaactcgcggtcccgcgccttcacatggccggggctgtaataggcgtcgaaccaggtcttctcgcccgccgccggtggcttggccaggcgcaacgtctgcaaggcaccgggcaggctggcattgaagcgaaagtggaaatggtcgaacaggcgcaaggcctcgatggcgtagaccacggcgatcttgcggtcttcgatacgaatcaaatgatcgccgttgttcttctcgccaccgccggcgaggttggatgagccggtgtacaccgtggggttggcgccgttgaaatcggtgaccacgaacttgttgtgcaccatatttcccgcattccccgaccattccgccttgaacggcgccggcgcgttgctcgccaggtagctgaacggcaacagccccaccgaaccgtccggtttgcgcaccgccagttcgccggtgcgctgggccacgccgtaagagaacagcgagcgctgcatcagcgcgtccagggcatcgcgcactttgccattgatcaggctcaggaacacgatggaatacagtaccgagctggtggcctgttcgatgctgctggcgatcgggtccaacgacaacgcgctgtcggcgtggggtgcaaagcacagcgaaactttcgagccgggctggtcgcgcaccacccaccattgctgcgacagcgggtttttgcgaaaggtggtgggcgccgtccagtaggcgtcgaacacttcggcgaacttgccggccacggtttcgtcatcgaacaacagcacgttgttcgcctggatatacaacccgcgcagagcaaagttggtagaaccgccgagcacccgaatcgctttgccggtgcggcgcacgatcaacactttattgtgctgctggctggagaaatgcaggcgcttgacctgcgccccggcggcggccaaacgcgcggcgctgaggctttcgcaactgtcggcggcgccttggtcaccatggtcgtcaatgattgcccgcacgcgtgggccgaggccttccaggcggcgcaggatgtctggttccttgctttcgtagatcagcgcgtcgagggtcagttcggggtcattcgctacctgatcgagcacttgcaggatcaactgccgcgcttcaaacccaagccatgcgtagtttttttcaaacggcgccatgtccaggtccagataagccctcggcgccgagcgtgccggcggcaggatgcgtgtttcattgttgaaccggtcgccataggcctgggaagacgcgaagccacgggtaaaaccgatgttgacgaaatcgctgatcgtctgggcttccagagacacctggttttccaggctcacgcccttgctcagcgtgccgtcggcgcccatgtagcaggcggtgacgcggtagcggaacaggccgggcaggatctcgctgggcacatggatccagcggaatttctggaacggcgcctcggtggagggaaaagtgcgcggctgttcgggcgtgggtgggtaatcaaaatgcaggcggttgtgcagcacgccccaatggtcggcaccggggtaacgcacctcgatgctgaaaccgacaaagtcaggcgtggcaaggtccgcagccaggtcaaatgccaacagcgcagcgccctccccgcgatagagcttgaaggtcagcccctggaacgtggtcttgctctcgaagtcggcgctcaagcgatgtcctttgtgctgggaggcgttgccttgagtctagcgcgtgcggcccatcaagccactggcgcctgggtgacaatatcttcaacgcccagcacgcgaccgtcttcagacaccacctcgaccttgcgcagcggcttgagcaagcgcgcatccaacacgcgggcgccctccacttcgggctcggtatgcacctcgccccactgtgccagggtcaccagcaccggcatcagtgcgcggcccttgtccgtcagttgatattcactgcgcgcaccgacttcgctggttttcaacaggccttgctcgaccatgtccttgaggcgcgtggcgaggatgtttttggccacgcccaggtgtttctggaaatcgccgaagcgggtcacaccggcaaaggcatcgcggatgatcagcagcgtccaccaatcccccaccacatccagcgcgcgggcgaccgggcaaccgtccccttccaggcatttgcgtttcatcggcgacctcccggcagcttgaaatattaggttgcattataggaccaggacgcgcaggataaaaacagtttcattattaaaccaaaactgtcgtgtggagtggatcatggatattcgtggaaaagtggtactggtcaccggcgccaatcgtggcctgggcaaagccttcgtcatcgcactgcttgaagcgggcgccgccaaggtctacgccggcgcacgcgacccggcgagcgtcaacatccccggcagtacgccggtggccctggacatcactgacgcggccagcgtgcaacgcgccgccgagcagtacaccgacgtcagcgtggtcattaacaacgccggtttcctcaagtacggttcgctgctggctgaagacagtatcgaaaacctgcagcagcattttgaggtgaacaccttcggcaccctgcgtgtcagccgcgcgtttgcaccgattctggccaagcaaggcggcggcgcgctgatcaatgttctctcggtgctgagctggctgagcccgcccggttcgggcggctacagcacctcgaaatccgcccagtggggcctgaccaacggcctgcgcggcgagttgcgcgaacagaacaccctggtgatcggcgtgcacccggcctacatcgacaccgacatggtggccgacatccaggcgccgaaaagcacgccgcaggaagtggtcgccatcacgttgaaagccctgagcgaagaccgcgaagaggcgttgatcaccgacatgacccacgccgtcaaagcctcgctgtccaccgatgcgccgatctacctcagccgttgatcaacgaaaagtgcgcgcccaccccggcgcgcacgccctcgcccaccgccagcgccaccgaacctgccgccagggccgtatcgccacaggcgaacacgccggccacggaggtctggcgcatttcatcggtgtgcagataagcgcccgtggggccatcgagcaactcacagcccaatggccccgccagcgggctgatacgtgtgcgcgacatcgtgaacacgccatcgaggctgaacacccggccatcgtccagttccacatcggcccgctcgccgctgagccgtctgaccaacccgttttgcaccgtgacgccccgccgatccagttgcgcctgttgctccgcatccggcgtgaagacgccattggtaaataatgtggtggtgccccagtccggcagcatcagcgcgtggtgcatggccagtggtgaagtggcgatgacgccgatacggccctggtccagctcgtagccgtggcagtacgggcaatgaaatacccgtttgccccagcgctcttcaagaccttcgatcgggggcaattcatccaccacgccggtggcgaggatcaagcgcctggcgcgcagttcaccattgcagcgggtttgaacactgaaaccgtccggctgttgcagcgcttgcactgcggtgtcctgcacccaggtcacggttgcgtactccatcaactggctgcgcccttcggcggcgataacctgcggcggttggccgtcctgcccgagaaagccgtgggacgtggccgcaaaccggtttcgccgctgccccgcatcaatcaccaatacctgacggcgcgcacgcgccagttgcaggcccgcagacaggccggcatagctgccgcccacgataatgacgtcgtaaatcatgtgtgtgatctcgtctttctgtgcacccggttgtccgggcactttcacggcacaccataagttacatgaaaataaggcgtcaagagtctcgcaactcttcaggttacgaacgatacttcgcagcgaatcgacttgaggttttttgatgagaaacgacacccggctttcgcgcatgctgcacgtgctgatccacatgggccgccatgaagagcgcgccacatcggaaaccatcgcgcagatgctcggcaccaacccggtggtggtgcggcgtacgctcgggttgctcaaggagaaaggttacgtgcgctcggaaaagggccatcagggcggctggaccctgggtaaacccttgagtgaaatcaccctgctggagattcaccacgccctcggcacgccgtcgatctttgccatcggcctgtccaccgaccacccgcaatgcctggtggagcaagccgtgaacgcggcgctgacggatgccttcgaacaggcccaggccctgctgttgcagcgcctgggtgatgtcaccctggcgcagttggcagaggattttgacgagcgttaccgcatggcgatgctgccttagcgctgcgaaggaatacggatatcgccgtcgcggcactgcgtcttcacgctgcgcgggcagccggcgaaggccaggtccttggtcaggcacacgcgcacttccgacagcaccttgcccttgcagatcaccgccagcccatggttgcccatgcgcgggttgctctcgcgaaacaacgcttcgatctcacgggcctgcaatgacggcggcgtattgaacggctgtaactgcgtcgggattgtcaccgcaccgagcgcggcatcggttttctccaggtaggccaatggctcaagcccggtgcaggtgccgtgtttggcccattcgtgcctgagcagcgaacgggtcggaaacaacgcggcacccttgtccatttcttcgcggctcaagcgcgactgcgcgtcacacgaggaaggccacccgcccttcgcgtattgcggccacaggccgtgcaacacaaagccatagcccttgcccgaacactgttcgttgtccgggtgcgtcaggcaaaacgtcggcgaccatgacagcgacagcacataaaaatcgaacacgcccggcgtcccttcgctgcgcggcgccgccgttgcgcaggtggcgaacgccagccacaacaccatcaggtatttcatacgtctgttccttgaaaaaatcgatcaccccgcaagatgagggttgcgccgcagcaccttgtccagaatccggtcggtcttcaatgcctcgatcgccaatgaaggatgctcgagttcaccgcgaatatgcgcattcatattcaacacatggtgccactggatatgcgcatggcacgggacttccagcacctcatcggtctcgccctccagccgcaacggctggtcttcgaacaccgcaaaggtgatacgcccgcgactgccgatcagctcgaccttgtcttcacgccggtctgccacaaagttccagcagcccatgcccaacgcgcccgaggtgaaggtccagcaggccgtcaccgcgtcttccgccgcgtactgtccggcctgtcgtgcagtaaaaccgctgacctcgacgatgtccccggccaggtactgaaacagatcaaagccgtggctggccaggtcggcaaaataaccaccgccagcgatggccgggtcggtacgccagttggcggcgttagcgtcatccgccgccgcaggtttgcacaggctccaggtgagctgacgcaactcgccgatgcgcccctccagcagccagtcacgcacctgctggaagcgcggcagcgaacggcgatagtaggaaacgaacaagtgcaaccctgcgcgctcgaaggtgcgttgcatcaacgcgctctgttcggcattcagcgacatgggtttttcgacgcagcaatgcttgccggcggcggccaccatcaagctgtattccagatggctgtcgggcggtgtggcgatatacaccgcgtccacttcagggtcgtcaatcagggcctgcgcatcggtgtagaagcgggagatgccatggcgcgccgcataatcgcgcacggcgtcctcgcggcgccccatcacggccaccaaggcggagccaggcgctttgtagaaagccggcccactcttcaattcagtgacgctgccacagccgatcatgccccaacgtacggtagtcatcggttttcctcgtgcgttttttcatccagcaggcagtatccacatcccccctcgtcggcgccaccgccgcttagcatgacaattgcattacacttttgtgacattcattgcgctaagggggagttactggatgaaaataagagccacggtcatttgccaacacgaggggcacatcctcttcgtgcgcaaggccagagcgaaatgggcattgccggggggcaaggtcgagccggatgaacgcccggtcggcgcggccgaacgggaactggaagaagaaaccgggttgaatgtggacgggttgctgtatttgcaggagctgaaggcccgcgacacgctgcaccacgtgttcgaagcctcggtggtgaatatcagcgaagcccggccacgcaacgaaatcatcgactgccagtggcacgcctacagcgccatggacgaactcgacaccaccgacgccacccgccacatcgtcaaagccttcctacgtcgcctgtagttcagcgctctgcccgctggcctgcaaacctcgcttgaccacgccattctctttctgccgttcgacaaaggatctgacgaacgtggcagcggctgcctgcgccaccggaaccgccatggcctggcgaatggtcatgaaatcatcctcgaccagccgccactgcgccgacactttgccctgcaggaaatcccgcacccccgccgccgcatccaggccttgctcgataaaccaatccacggccgccgccgacgttggcgcgcggaccagctcggcgtgctgcagcgtgcggctcaagtacaggtcataggccgcgccctggccgacggcgatccgcttgcccgctgcgtccagctgcgccacgtgggtgagggctgaatccgccgccaccagatacgtgcccttgatcgccacatagggcgcgctgaaggcgatttcctgttcgcgcaccggttcgatggccagaaaggcgacgcgccacacatcctcggccaatgcggcaaagaccttgcccgccgcctcaaaggtgatcaactctagcgtcactcccaactcgtcggccaaggcctctgccagcaccacggaaacaccttggggctcaccgcccgggccgcgttgcgcgagcaccgggttgccaaaattgatggcggcgcgcagcacgccgtcgggggccagttgttgcagcacttgcgggtcaatcattgagcgctccttgacgagtccgttgcacggtcttgcggatcacaaacggcaatacgccgccgtgctcaaggtaaccaagctcttgcagcgagtcgaggcgcagagccaaaacacagttcgtcacagcgttatcggcgcgggtgatctgcagggtgatcgggttctcgccgaccttcagcgcgtccagccccagaaagtccaagcgctcgctgccgtccagcgccaaatcctgcacggttgcgccctcggcgaacaccagcggcagcacgcccatgccgatcaggttgctgcggtgaatgcgctcgatactgcgcgccaccaccgctctgatccccagcaggctcagcaccttggccgcccagtcacggcttgagccggcgccatagttgataccggcaaacagcaccgtcggtgtacccgcatagctttgcgcggcgaggtacagcggcaggtactcgctgtggtcggcattccaggcccacacaccccggcgtgggggttgctgcgcatccaacaggttgttcaggcgcgggttggtaaaggcgccgcgcaccatcacttcatggttgctgcgccgggtggagtactggttgaaatccacctcggcctcgccgcgctcgcgcagccaggcaccggccaggctgtcgggcgggatggtgccggccggcgagatatggtcggtggtgacgttatcgcccagcaccaccaaggctcgcgcattgcgcacagacagactcttcgcgggcaatggctgcacgtccgccagatactgcgggcgccgcaggtaagtcgaattctgatgccagccaaaccgcacactgccatcggcctccagcgcctgccaatgatgcgtgccctgccacaatagctcgccacgctggcgaaacaacgccgggcgcaccacctcggccacttgcgcagccacctcggcatcactgggcatcagctcgtgcagatataccggtatgccctgagcatcgatggcaagcgggtggctcgacaggtcgatgtcgatactcccggcaatcgcataggccacgcatagcgcgggcgacgccaggtagccggcgggtacattcgggttgacccggccctcaaagttgcgattgcccgacagcaccaccacgcccttgaggccctggcgagcaaagctttcgacatgggcttcaaggctgccggagttgccgatacaggtcatgcagccaaagcctgccaggtcgaaacccagcgcggcaaaatcctccagcaaccccgccgcctccagataatcggccaccacccgcgaacccggcgacaacgaagtcttgacccacggcctgcgccccacgccacgcgcccgcgcattacgcgccagcaacccggcctggaccatctgcgcggggttggcggtattggtgcaactggtgatcgccgccatcaccacggcgccgtgggtcagcggggcatcgaaggacggctcgaaaaactgctgaccggattcggcctgcacctgttgatgaaacgaagccgcggcattcgccagtggctgacgctgatggggctgatgcggcccggcaacactcggttcgacctgcgccaggtccagttcaatcaactcatcaaactgcggctgcggctcgccttcctggcgccacagggattgcgccgccatataagccgcgaccttggccaacaagggcttgggtcgcgcggtcaattccaggtaagacagggtctcgtcatcaaacgggaaaaacaccacggtggcgccgtactctggtgccatattcgccaccgtaccgcgcgccgcccaactcagggacgacaacccgggcccggtgaattcgacaaacttgccgaccatgttgcgctgacgcaacagctcagtcacggtcaacgccagatccgtcgccgtcacgccggggcgcagcgcgttgctcacacgaatgcccaccacttgcggaaacgcgatcggcaccggttcaccgagcatcgccgcctgcccttccagcccgcccacgccccaaccaagcacgccgatggcattgatcatcggcgtatggctatcggtcgccaccatgcaatcagggtgcagcagtaccccgccgtcggccgccgggctttcccacaccacctgcgcaatggcttccatgttcatctgatggatgatccccgtgcccggcgggatcaccttgaagttatccaggctggcctgggcccacttgataaagcggtagcgctcgctgttgcggcgaaagtcgatgtcgaggttggcgtccaccgcgcccgcttcggcgtagtgctcgacgatcaccgaatggtcgatggtcagcaccgccggaatcgacgggttgaccgccgtcgggtcgccgcccagttccgccaccacatcgcgcatcccggcgaaatccgccagcgccggcaaacaggtggtgtcatggaacatcagccggttgggctggaacggcacctcgcaatccgggccgctgccggtcgcccgcgccagcacctgcggcagggacgccggggcacagcgcgcgatgttttccagcaggatgcgcacggcatacggcagccggtgcagttgttccggggtcagcagttgatgcaggtcgacataggcgtagcgctgcccatcgatgtgcaggtggttgagaaaatcgctcatagttggccgaacacccgttcgatacgcgccaggccccaatcgagttcttcgcgggtgatcgacaacggcggtgcgatgcgcaggacgttttcgtgagtctccttggtcagcaggccttcggcgagcagcgcttcgcagatcggccgcgcgtcgcggtccagctccacccccacccacaaaccgcgcccgcgaatctcgcggatcgccggagcattcatcgccgtcaggcgctccaccaggtactggccgagtctcgcgctgttgtcgatcaagccttcttcttccaacacgttcagggcttccaggccaacggcggcggccaacgggttgccgccaaaggtggagccgtggctgccggcgtcgaacaaatccatgatcgagtgatcggccacaaacgccgacaccggcatgatcccgccgcccagcgccttgccgagaatcaatgcatccgggcgaatgccctcgtgctggaaggcgaaccacttgccggtgcggcccaggcccgactggatctcgtcgagtatcagcagggtgttggtctcatcgcacagctggcgcaactcacgcaggaacccggcgggcggcacgcgaatgccggcttcaccctggatcggttcgatcaaaaccgcgcaagtgtcggccgtgatggcccggcgaaagctttcgatgtcgccaaagcgcgcttcggtgaagccgttgcagaacgggccgaaatcggccttgtaatccggttcggaggagaagccgacgatggtcgaagtgcgcccgtgaaaattgttgtcggccaccacgatgttcgccctgttggcggcaatgcccttgacccggtaaccccaacggcgcgcggccttgatcgcggtttccaccgcctcggcgccgctgttcatcggcagcgccgaatcaaacccgctgatacggcacagcgccttgaggaagttgcccagcggctcgctgtagaacgcacgggacaccacgctgatcttgtcaatctgcgccacggcggcggcgcggatgcgcgggtgaacatggccgtggctgacggcggagtaggccgacatcatgtccaggtaacgcgtgccgtcatcaccaatggcccagacgccctcgcccttgacgatgaccaccggcagcggcgaatagttgtgggcgcagaatcggttttcgagggtgattgccgggttggagtgcatggggtgtcctgcctggtaaaaatctaatgaacaaaagaggtcaactgtgggagctggcttgcctgcgatagcggtctgtctgatgtaccgctatcgcaggcaagccagctcccacaggtttaatcgcatttcaaatcaggcgctgagcagcttgccgctgcgaatcggcgttgcaccggaaacgcggcccagcgggtcaccgggtttcacaaagcgcacatcgcggcgcatgtacagcacgccagtggtgtggctggtgacggtcaccgcctggccgctgtgcgggtcaacgatgtcgaacaacgcctgccccgcttcgacgcggctgccgacggcggcgcggtgcaccaacaccccggcgcccggcgcataaaactgctcgctgccggccaagggtgtcgccgggttgcgcaaggccggcaacgggcgcggcgtgccttcaatggcgcccaggtgggtcagataatcgatgatcgcagtggcgtcatgctcggccagctcgtaagacacatcacgctgcccgcgatgctcaaccgtcaccgcgatgctgctgtccggaatcgggaaacgctcgcccaactgctcgcgcaggttcacccacaacaggtacagcgcttcatcaaacgaattggcctgggaatcggtggccagcaaggtggcctcggcgccgatgtaacgcgccagcggttcgatggtcggccataccgactcaccggtgtagaggtgcatcgcggcctcgcgggagcaatgcaggtccagcacgatgtcggcgtcgtgggccagcagcatcagggtgtgttgcaaggactggtattcgtccatcggctgagcggcgcgcaggcattcgccccaggcgttgcggatcagctcgcggttggcgtggatgtcctggcccagcaggtgttcgaccttgcccacaatcgcctggtacggcaccggaaaaccccggttgtaattgcgcccgctgcccagttcaaaccgcccgctcggggcgcccatgatgtactggcccaggcccgccgggttggccaccgccaccagcacgatttctgcgttcaggcgcccggcactttccagcgccaccaagtgccggcgcagttgcgcggccaccagcatcgccggggtttcatcggcgtgcagcgccgcctgaatatagatttttcgacctgcacccgccgcgccgtaatgctcactgtccacgtacctgtgggtgccctgtgtcgcttgcagcaaggggtgttgaataagtttcataaaccggaaatctcgatattcgagtgatggaccttgagaaaaatactaacgagaccgggtgatcgcccgtaagggcggctacagctatctcgatctgataatccgatcggtgtgggagctggcttgcctgcgatagcggtctgtcagccaacatggatgctggcagtgatgccgccatcgcgggcaagcccgctcccacagtgagggggactaccagagcgccagggtgtagcccagcatcacgcggttttcgttgacgtcattgaagtagttgcccttgctcagggcgttgcgccagcgcatcgacacgcctttgaacggcccgttctgcaccacgtaactgatgtccaggtcacgttcccattcacgcccttcgccgttgaaaccaatcacctcggccgagtcgcccttggcgtacttgatgcccatcaacaggcccggcaagcccaggtcggcgaagttgtagtcgtagcgcgcgtgccaggcctgttccttggtctgggtgaagttgctgaactgatattcggtgaacaggtaggtaatcgagccgtccaggtaggtaaacggcgtggtgccgtactggcgctggaaaccgccgccgatgctgtggccgccgtactggtaggtcaggcgcgtgctcagcgcactgttatccaccttgccggccaggcccgcgccgtccttgtcggagttgaagtagcgcacgtcggttttcagcgtgccgccgcccaggccgaagttgttcttgaagcccacgtattgctgctggtagatgctgtccagcgcggcaaagtggtagctgaccagcgtgttcggcgtcagcgagtaatcgcccccggcaaagcggaacttgtcgctcagggcggtgcttttgtagaccttgctgacggtggtcagcttcatgtcttcgtagttggtggagtcgcgatccttggcttggtcgatctgcccaagggtgactttgaggttgctgatgtcgttggacaccagttgcgtaccgctgaacgactgcggaaacagacggctggtgttgggctgcaaaatcggcaggtccggcaccaggtagcccacgcgcagttcgctcttggcaaagcgcgccttggcggtcacgccgagtttggagtactcatcggacacgttcttgtcgctgtcgcgttgcagcaaccccgtaccggaaaggcccgggctggagtcgagtttcacccccagcatgccggtcaagtccaggccaaagcccacggtaccttcggtaaagcccgacttgatgcccaggataaaaccctgggcccattccgcccgcatcgactgcgaggcgttctcccggtagtcacggttgaagtaatagttcttcaattccagcgtaccgctgctgtccttgatgaagtcggcctgggcggcgaacgggatcatcccgctgctcacgacgcctacgcctgtgatgagttgagtcagggattttttcatttttttaagctcctggcagtgtcatggttgggggtttttattgttcttcggacatggcttcgccattcgcgccaatcagcgattggcgcggcaggtgaaatcagtcctgggttacagcgctagcggtacggggccctggcggatgcggtagccaccgttttcaagtttctccaaggggctggcggcggccagcagcttgcgggtgtaagggtgttgcgggcggtcgaaaatctcgtcacgcgcgcccatttccaccaccctgccctcactcatcaccgccacccggtgggcaatgcgctccaccgctgcgaggtcgtgggagatgaacaggcaggcaaagccgtactgcgcctgcaggcgttcgaacagttcgagaatctgcttctggatggtcatgtccagcgccgaaatcggctcgtcggcaatcaccaaccgtgggtgacgcaccagcgcgcggccaatcgcgacgcgctggcgttgcccaccggagagctgatgcgggaagcggtcgacaaactgctcggccaagccgatgtccagcagggttttcgtcacgcgctcacgcttttgctcggcgctcatgccgggcacatggcgcaggggctcggcgaggatgtcgccgattttcatgcgtgggtcgagggacgaatacgggtcctggaaaatcatctggcattgcagacgatgttcacggttgccggacttgagaatgtccacgccttcaaactcgatggcgccggcgcaggctttgttcagcccgacaatcgcccggcccaacgtggttttgccggagccgctgccaccgaccagggccagggtttccccgggcgcgatgctcaggttggccgagtgcaccacgcgtttgaactggctgcgaccccacaggctgcgcgggcccgggtgttcgatgcacacgtcttttaccgtcagcagtggcccgtcagccttgggcaaggcggccagcacaccgcgacgcggcaaggcttccagcagttggcgggtgtactcggccttgggcgacagcagaatctgttcgatggtgccctgctccaccgcacggccttcgcgcatcaccaccaccttgtcggcgtaacgcgcgaccagtgacaggtcgtggctgataaacagaatcgccgtgccctgctcgcgggtcaggtcgagcatcagcttcaatacgtccagttgcgccaggcagtccagcgccgtggtcggttcgtcggcaatcagcaacgccggacgcaacagcatcaccgaggcgagcatgatgcgctggcgcatgccgccggagaactcatggggaaacgccgccaggcaacgttcggcgtctttgatgccgatatgcccgagcatctccaggctgcgggtgcgaatctgttcctcggtcagcttggtgtgcaagcgcaggccctcggccatttgctcgccgatgctcatggacgggttcaacgacaccatgggttcctggaacaccatgccgatcttcgccccgcgcagttggcgcagttgctcgggcgccaggctgttgaggtcgtggccctggaagcgtacctgcccgccgcaatgctccagcggtggcggcaacaggccgatggcagcgcgggcggccatggtcttgccgctgccggactcgccgaccagcgcgacgatttcacccggtgcgatggtgaaactcaaatcgttgaccgccagcgggccgtgggcgccgacgcggattttcaggtgatcgacggccaagagtacgtcagtcatggttatttactcatccgtggatcaaggcggtcacgcaaggcgtcgccacacaggttgaacgccagcagcgccatggcgatgcagaccccgggaaacagccccagccaactggccgtggcaatgtacggccggctggccgcaagcatgttgccccaggtcgccgccggtggcggcacgcccaggccgaggaaactcaaggcactttcggcgagaatcgcccagccgaacatgctggtcgccagtacacacaccggcgctacgcagttcggcgcgatgtggcgcagcatggtgtacagctcggagttgccgatcacccgcgaggcctccacgaactctttctcacgcagcgacaacaccgtgccgcgcaccacccgcaccaccgacggcgtgtaagccaggctcagggcgaagacgatgccgtacaggctcgggccgatgatcgccatcaagcccagcgccaacagaatccccggaaacgccagcagcgcgtcgttgatcatcatcaggccacggtcgacccagccccgcaggaaaccggcgagcaggccaaggaaggtgccggcgacaatcgccaggctcaccgtcaacacactcacccacaggctggtgtgcgcgccgatcatcaagcggctcaacacatcgcggccatattcatcggtgcccagcaggtgcgcggcggtcggtgcctgcaagcgtgccagcaggttcagcgccagcgggtcacggggcgtccacaccaggccgagggcggccatgatcaacagcaacgccagcaacgtcgcgccgatcagtgcattcaacggcggcacacgccaggccctgggggcacgcgccggcgccggcagcagcacgtcgggcgcaacaggaagaggcttattcataacttaaccctggggtcgaagagcgggtacagcaggtccaccaacaggttgaccagcacataaacaaaggtcaccagcagcaggcagccttgcagcacggggtagtcgcgagcgtagatggcgtcgaccatcaggcggccgatgcccggcagggtgaacacggtttcgagcaccgcgatgccgctgagcaggttgccgaggatcaggccgatcagggtcaaggtcggtgcaaacgagttgcgcaacgcatggcgccacagcaccgcgcgctccgacaagcccttggcccgggcgtgggtgatgtattccaggcgcagcacttcaatcgcactggcccgggccatacgggtgatcgctccgagttccaccagcgtcaacgtgacaatcggcagcacgataaaggtcactgcctgccacggtgactggctgaacgacacatagcccaccaccggcaaccagccgagcttgatgccgaatgcgtagagcaacagcaggccgagccagaaactggggatcgacagcaacagcgtcgccgtcgacaccacgccaaaatccagcgcactgtcctgcttccacgccgccagcaaacctgccggcaccgcgatcagcgccgccagcaacaccgagaccagcacgatcccggcactcacctggaaccggtccagaatcagcggcagcaccgcctcattggtcgtgatcgaatgccccaggtcaccgctgagcacggccttgagccagatcacaaattgcaccggcaagggctgatccagcccaagcgacgcgcgggcaacttccaggctgtgggcatcggccatgtcgccgagcatcaacagcgccgggtcaccgggcaccaggcggatgatcgcgaacaccatcagcgaaatcagcagcaaggtcgggatcgacatcgccaggcgttgagaaataaagcggaacatcctcaattactcccggaggctggaacgctgacggtccacaggcgcggcttggacaccggccaggtgcgcaggcccttgacgtagtcacggctggcggcgatggcattgccgttgtacatcgggatcaatggcacgtccttgatcatctgctggtgcagttggtcgaacagcgtctggcgtttggtgaggtcgccttcgcgctgggcttcacgcagccagtggcgggcatcggggttgtcccagaccttgcgggcttccttgtccttgtctccggtcatcgagtcgaaactcagggccgggtcgaggcgttcggaatacgggaaggccatcatctggtagttgccgctctgatagcgttcaagctgggtgccccactccagggtttccagctccaggttgatgccgctggccttggccatggcttgcacgaacacgcccatgtcgaaaatcgcggcgtagcgtttgttgacgatcagcttgatcggctcgcctttgtagcccgcctcgcgcagcaattgcgcggtcttggccgggtcgaaggcaaagccctggtcttcaatggcggtgtggtaatggctgccgctggcgaccatcgagttattcgccttggaccgcccgccggtgagggcttcgacgatttgcgcggtgtccagcgcgtgggcgatggcttggcgcaggcgcacatctttaagcagtgggtcgcgggtctggaacaacaaggcattgaccgacatggtgccgctggaagtcacgcgcacgccggggttggccgccagctcggtggcgtccaacggtgtcacgtcaatcagcaggtcgacgtttttcgacagcaaggccgccttggccgccgccgggtccgggatcaccagcaagcgcacgcggtcaaggtgggcggtcttgttgccggtgtagccgtcgggttctttttcatcgcgcggggtgtagttggcgttgcgcagcaactctacgtattggccgggcttccattcgccgagttggaacgggccggtaccgaccggggctttccagctgccgtcggcattcagcgagtccggcgagaggatgccgctgccgccacactcaggcagcgcggtgctggtgaggaacaggccgttgggcttgtcgagggtgaacaccacggtcagcgggtccggggcactcatgtcgacgattttcgcgccgccatggccatcgaattcaggcgcgcagcgccattgggttttggggtcgaggaagcgcttccaggtccacaacacctcggcggacgtcagcggcttgccgttctggaatttcaccccgtcacgcaagtggaaggtgtaacgcaagccgtcgtcggacacttgcacctctttagccagcaacggcccgacggtggcgtcttcgcggaacgccaccagcccttcggtgatgtgcatgatcaccgcgtcggaattggtgtcgcggttcacacccgggtcggtgctgcggatgtcggcgttgagcgccaccttcaagacactttcagcgtgggcagtgcccatcagcgccgcagacaaggcgcctgccaggataaaagtcttgttcatggataaatgcaccttaactgttccttacgcatgggttcggacgctggcaggacccaaaaagaggcacggccgaactcctgaatagttgttgttgttttagtcgccgttcacggtgggcgaatgttcctggaccgatcttattcttcacgcgccaaccttgagaagaacgctccaggtgatcgggctcgggttttccgatcactgggcaattgcgtatcgcaatgccctgagcctaccgaaaaatcgagggttaaagccgtttacccactatcaaaaataatgaacctgatcggccaaaccgatctgtgcgcccggtaagccatcagataagctggccagcatccaatagtttagatgccacgaccgaggctactgctcatgactctcacccatcttcgtgcgttctgtgccgtggttgaaaaaggcagtttccgctctgctgcgcgccagctggacgtggcacaaagcaccctgacccaatcgatccagaccctggaaaaagaactcggcgtggtcttgctgcaacgctcgaaccagggcatcaacctgacgccggccggcgaagtgttcctggtgcgtgcgcgctccatcaccctggactgcgaacgcgccctgctcgacctgcaaccctggaaaggcgaacccgaaggcaacatcgccctgggcgtcacctccgaacccctggccgaattgctgctgccggtgctgagcaacttcacccagcgcttcccgcgcattcaagtgcacgtggccagcgacaccaccaaagggctggtcgagaaggtgcgcgatggccgcctagactttgtgctgtgcccgctggcgccgaacgtcactgacatcgacctctccatcgaccgcctctacagttccaacgccgggatcatcgcgcgcaagggccacccgctgacccaggccaaatccgtgcaggcgctggtggactgccagtggatcagcgtgcgcccttccggtgtggtcggcggcgcggaaaaccgcctggtcgagctgtttcgcacccagggcctggcgccgccgaaaatcgcgatcaccaccgattcactgctcgaaaccctgcacatcgtttcggaaaccgactacctgaccatcgaaccgcgcatgttgccggggatgaagctgttttccagcgcactgaccaccattgccatcgaagaacccttggcgagccgcgatgtgtgcctcatcagccggcgctcctcgccgctgaccagcgtcagccaggaactcaccagcatgctgatttcctattcgcggctggtgcatcgcagccgttgacctttagccccacgagcctactcatgcccccgacttcctacgatggtttgccccgtgccagcgccagcagcgttggcgttgaccccgatcaagtggttgcctttctcgacgcggtcaaggccgctggcctggacctgcacggttttatgctgcaccgccatggccatgtcgtcgccgaaggctggacttggccggtggaccctaacgagccgcgtgtgctgcattccatggccaagagtttcaccggttgtgcgattggcctggccatcgacgaaggcttgttgaagctggatgaccgattggtgagtttcttccccgacgaagtgccggcagacgccgacccgcgcctggcggacatgaccgtcgagcacctgctgaccatgcgcaccggccacgccagcaatacctcgggctcggtatggcgcgggatcgagaccagctggattgccgaattcttcaagatcccattggcttatgcgccgggcaccgactacgtctacaccagcgcggcgagctatatgttgtcggcgctgatcaaccgcgtgaccgggcagaccttgcacgcctacctcaagccgcgcctgttcgcgccgctggatattcacaacgcgcgctgggacatcggccccgacggcgtcaaccctggcggcaatggcctcacggcccccgtgtcggcggtgttgaaactggccgtactgcacgcgcaaaacggcgtgtggaagggtcggcaaatcctgccgcaggcctgggtcaaggcggcgacacaaccccaaggcgggccgaacagccgctatggttaccactggatgatgaaaccgggcggcgccttcagcgcactgggcgtgtttgtgcaaatggcggcggtgtaccgcgagcatgacgcaacgctggtggtggtgggcggcatgaagaactcggccgagatcattccgtacatcgagcagtatttcccggcggcgtttggcggcggcggcacgcccgaggcggatgcgcgattggagacgcggttggcgagcatggctgagcaaccgctattggtttcagcctgtgcggtgccagcggattccaagcgcgtgttttcgatggccgagaacgggttgggcgtgaaacagctgtcgtttgattttcaaggtgacgtactgacctttgaattgaccgatagccaggccacacaccgcctgaatgtgggggttgatcattggctggcaggcctgaccagcatgcccggtcgcgccctgcaccacggttatgagttcaacgaggcgcaggtcgtagcgggcgcccgctggctggatgcgcacacgctggaaatgacctggatctacccgcagaccgcgttccgcgatcgggtggtgtgcgtgtttgagggtgacacggtgagcttcgcccgtaccgtcaacgtcaacagcgcaaagcgcgagcaggctgttttaacaggcacaacaccgagctaaatgtgggagcgggcttgcccgcgatgagggcgtgtcagtcaacactttcagtaactgacagatcgctatcgcgggcaagcccgctcccacattttgatttttgcccggtcttagaaaaacgcgtggctataggtcaggtacagccggttctcatccagatcccgctgcgtggccaccgtgctgcgcaacatcgcgttgcgccactgcaccgcaaacccggtcagtgtcttgctctggaacgcataggtcagcatcacatcgcgctcccactcatgctgcgggccctgatccgatttgatatccccgccgcgctggtacatcacctgcgacgtcagccccggcagccccaacgtggcgaagttgaacgcgtgctgcgccacccaggtgttctccccggcccgctggaaacgcgcaccggtctggcggtcggtgatcaggtaagtcgatgaaccatcgccctcgttgagaaacggaaagtcgctggagccgttgaggtgctgataaccgaggctgaatgcatgcccgcccaggctgtaggtgaacagccccgccagcacgcggttatcgacttcgccattgttgtgataaccgctgctgcggtagccctcggcccgtccggcggcgcggccgttggcaccgtcagaggtgctgtcgaaaaagcgcacatcacttttcaggctgcccaccggcaaggtcaggttatgcaccaggcctacaaagtgctgctggtaaaagtcttccagctcgccgtagtagtactgcagcagcaggttcgggcgcacggtgtaatccaccccggcgtagtagaactgattgctgcgcttgcccgccgggccgccagcgccgctgatggcgaggtcctcgttgtttgaagaattacggctttttacgccacccaggcgcccgccgatcagggtgaagttctcgaagtccttggaggtggcttgccagccctgaaaggtctcgggcaacaggcgcccgtcgttgtagaccaccaccggcagcttgggcatcagggtgccgactttcagttctgtcttggccacccgcaccttgccggtcaggcccaggctggcgaaatcactcaccgcgcggccgtcgctgccggtggggaacacaaacccgccctgggtcacgccgttggggttgccgtgggtgccgcgcccggaatccaggcgaatgccgagcatgcccagggcgtccacgccaacgccgatcgggccctgggtgtagccggaattgaagttgaggataaaaccctggccccactcttccagctttgagggctgggccgagccgctgcggttgtcctggttgaaatagacgttacgcgcctcgattttggcgtgggcatcgtcgatgaagccttcggcatgggcgacagtgctggcggcgagtaaaacgcaggcgcacgacggcgccgatttgaatacggaaattttcatgggtgtacccgtggctcttattgttgtgtggggttgcagcggcgacgcagatcaactgtgggagctggcttgcctgcgatggcggtgcaccagcaccaaagatgcaagctgacagacggctatcgcaggcaagccagctcccacattgatcaggttgggagtgcggtgacttcagccaacggttttttgcgctcggtcatgcgctgcagcgcgaagatcgcaatcgaacccagcagcgccgggagcgccagcacgatgaaaaacaccggcggctgccccagttgcgcgatcagccacgcccccagcaccgagccgatgatcgaacccacccggccgttagccatggcccaactcacgcccgtcgctcgtgcggcggtcgggtaaatgctcgccgacagcaggttcaaaccgttctgcgccccggccacgccgaaaccgaccatgaacaccgtaagccccagccaaaacgcatcggccagcacaaaaccaatcaacgcgatcaccagcgccgagcccagatacgccaggcccagcacgcgatacgggctcacgcggtccatcagcagtgccatgaggatcgcccccaccgtgccccccagcggcaccatcgcgccaattcgcgcagcggcggcgatgtcgtagccggcgtctttgaggatgctcggcagccaactggtcagcaggtagaacacaaacagcgagcagaaaaacgtgccccacagcaacacggtgcgcagggcgcggttctcaatgaacagttgcgaaatcggcgaacggacggccaccgggctttgcggttcgatgaagctgatgtcgtgcaggtcggtgcggccggtgatcttgcccatcacggttcgcagcgcttcggtgtggcccgcgtgggccgccataaaacgcactgactcgggcaaccaccaggccagcaacggcaacagcagcagcggcacgatcccgccgatcatcaacaccccgcgccagccaaacaccgggatgatctggctggcgaccgcaccgcccagcgcgaggcccgtggtgaagccgctgtaagccagggtgaccatgatcatccgccgccgtgccggcgagtactcggcgctcaaggtgatacaggtgggcatcgcgccgcccaggccgatgccggtgagaaagcgcaaggcggtgagcatgtcgatggaggtggagtacgccgaagccagggtgcctaggctgaagatcagcaccgagaccagcagcacttttttgcgcccgtaggcatcggcgaccgggccgaagataaacgcgccgaccatcaggccgaacaaaccggcgccgaaggccggcgacaattgagccggttgcaggccccattcctggcgcagggccggggcgatgtagccgatgacggcggtgtcgaacccgtccaccagcaccaccagaaaacacagcaccagcaccatgatctggtagctggacaccctgttgttatcgatcattgcgcctgggttggcagtcttgctgttcatcaatgttcccctgtttttggagttgtctttggggtgagtcaagtgcactgcaaaagcgtgtttcaggttgaaaatacggccccctgtgggagctggcttgcctgcgatagcggtgtgtcattcaccatttttccggcagatgtaccgccatcgcgggcaagcccgctcccacaggggttggctttgcctgttggttagcggttgagcaggtccagcgccacatccacgatcatgtcttcctgcccgccgaccatgcggcgtttgcccagctccacgaggatgtccacggccttgaggtcatagcgcttggcggccacttcggcatggcgcaaaaagctcgaatacaccccggcatagcccagtgccaacgtctcgcggtccacccgtaccgggcgatcttgcaacggccgcacgatgtcgtcggcggcgtccatcagcgcgtataaatccgtgccatggttccagcccatgcggtcggcggcggcgatgaacacttccagcggcgcgttaccggccccggcgcccatgccggcgaggctggcgtcgatgcggtcgcagccctcctccaccgccacaatcgagttggccacgcccaacgacaggttgtggtgcgcgtgcatgccggtttcggtgtcgggcttgagcacggctttcaccgcacggaagcgctcgcgaatgtcctgcatgctcatggcgcccccggagtccaccacgtaaatacaggtggcgccgtagctctccatttttttcgcttcaagtgccaggttctgcgggctggtgaggtggctcatcatcagaaagcccaccgtgtccatgcccaacgtgcgcgcgtattcaatgtgctggcgcgcgcagtcggcctcggtgcaatgggtggccacgcgcaccacccgcgcaccggcgttgtaggcggctttaagatcgtgcacggtgccgatacccggcaacaacagggtggcaaccttggcgtggctgatcacatcgctgaccgcctcgatccactcaaggtcggtgtgggcaccaaaaccgtagttgaaactggagccttgcaggccatcgccatgggccacttcgatggaatcgacgcgggccttgtccagcgcgcgggcgatggtttgcacattgtcgatagaatactggtggcgcaccgcgtggcagccgtcgcgcagggtcacatcgctgatgtagagcttcttgccggggttgaaggtcatggtgtgagcctcacaaggcctgcgccatgcgctcggcggtggccagcgcagcggaggtcatgatgtcgagattgccggcgtaggccggcaggtaatgggcggcgccttcgacttccaggaacaccgtggtcttcaagccgctgaagcgccccaggccgggaatgttcagcggcgcctcgggggcgatcacttcgaattgcaccttttgcttcaggcgataacccggcacgtaggcagtaacggcattcgccatgtcttcaatcgacgcctccacctctgcctgatccgccgcctccgacagcacatacaccgtgtcgcgcatcatcaacggcggctccgccgggttgagcacgatgatcgccttgcccttgcccgcaccgcccacggcctcgatggcctgcgcggtggtctcggtaaactcgtcgatattcgcgcgggtgccgggcccggcggatttgctgctgatggacgcaatgatttccgcgtaatgcaccttggccacgcgggacaccgccgccaccatcggaatggtcgcctgcccgccgcaggtcaccatgttcacgttgagcgccgccagattggcgtccaggttcaccaccggcacgcagtacgggccaatggcggcgggcgtcaggtcaatgacgcgaatgcccggtttgtgctggcgcaacaaggcgtcgttgtcgacatgggccgtggccgaggtggcgtcgaacacaaaatcaatgtcggcaaactcgggcatgcgcaccaagccttcgacgccttcgtgggtggttgccacaccgaggcgacgtgcccgttccaggccgtcggagcccgcgtcgatgccgaccatcaccgccatctgcaactgtttgccatggcgcaggatcttgatcatcaggtcggtgccgatattgcctgagccaatgatggcgacgttcttcttgtctgtgctcatgtcagcgccccaaggccttggcggttttgccggcgataccgaactgggtcttcggcacttcggtgatgatcacccgcaccgactccggcggggcctggatcgacgcgaccgcagcattggtcaatgcctcgatcaaccgcgccttctgttcgtcgtcgcggccttcaatcagatacacctgcatgatgggcatggtcggttcctcacttggactgggaggcaaagcgcatggaaacgctgcccaggtgctggtagcgcacggtgatctggtcacccgcctctaccgcaatggcttcggtgacgccgccggtcatgatgaacgtgccggcggggagttccttgccttgggtggcgagcatattggcgagcatcgccacgctttgcgccgggtggccgagtacggcggcaccggcagcggtggcgaccacttcgccgtttttctccatcaccacgcccaggcatttgaggtcgatgcccaaggggctgcgcgcctggccgcccgtgacgaagcgtgcggacgaggtgttgtcggcgatcacactcttgaggtcgaaacggaagttttcatagcgcgagtcgatcacttcaaccgctggcaggatgaaatcggtggcggccaagacatcgcccacgtgcacgccggggcctttgagcgggtgcttgagcacgaaggcaatttcggcttcaaccttggggtgaatcagcgaatccacatcgatcaccgagccgtcggcgcaggagccgtagtcggtgataaatccgtgaatgggctcggtgacgcccatctgtttcatcttggcgaaggacgtgaggcccattttcaggccgacaatacgtacgccccgcgcctccttgttggcgcggatcgcattctggattgcgtaggcgtcctcccagtccatgtccgggtgggtatcggtgatcttggccacggcctcacggttcagctcggcgttttccaaatgggtggcgagttcggcaatggttgctgctgacaggttcatggggttgcccttcaaacaaatcggatggaagccgagccgataccgcccaggctcatgcgtaactggtcaccgggctgcaccgggaccatggcggccagggagccggacaggatcacttcgcccttcttcaaggcgatgcccagttggccgagggtgttggccagccacaccaccgcgttcgccgggtggccaagggcggccgcaccggcgccggtggcgacgatttcgccgttcttttccagggtcatgccgacgcaggccaggtcgatgtcacgcgggtcggccacgccgtcaccgagcacaaatgcggcggcggacgcgttgtcggcgacggtgtcctgaatcttgattttccagtccttgatccgtgagtcgacgatctcgaagcacggcatcacataggcagtggcgcgcagcacgtcggcgacggtcacgccggggccaatcaagtcttccttcaacacaaaggcgatttcaccttcggccttgggcgcgatgaaatccgcgcaggccagcgcggcaccgtcgttgaccagcatgccgctgagcaagtggccaaagtccggctggtccacgccaagcatgttcatcaccacttggctggtgacgccaatcttcttgccgatcacgctttgcccggcgtcgagacgcggttgcagcatcgccaactggatctggtaggcctcggccacggtcaactcagggaattgctcggtcaacggcgccaagggtttcttgtcggtcagcgcctgatgcaactgcgcgccgaggtggttgaggtgggtcatggcggtactcacaggcggatgcacacgttgcgcagctcggtgtagaactccagggaatgcaccccgccttcgcggccgatgccggattgcttggcgccgccgaacgcggtgcgcaggtcacgcaggaaccacgaattgatccagcagatgcccacgtccagcgccgcgcccatgcggtgggcgacttgcaggtttgtggtccacacgctggcggcgaggccgtaaggcgtgtcgttgaccaggcgcaccacttcgttttcatcgtcgaagggcgcgatgtggcagcacggcccgaagatttcttcgcggatcacggaggagtcttcgcgcaggccggtccaaatggttggctgtacccaggcgccttcggccagctcggcgggcatgtccgggatgccgccgccggtcacaacggtggcgccgtctttggccgcctgcgcgtaatagctcaacactttttgccgatggcccacggaaaccaacgggcccatggtcacgcccggggcgttcggcgggccgatcttgatggcttcggcgcgcaccttgagggcggcgacaaacgcgtcaaacaacggccgttgcacgtagacgcgctcggtgccgaggcacacctggccgctgttttcgaacaccgcgcgggcgatgccggccacggctttgtcgaggtccgcgtcagcgaacaccacccccgcgttcttgccgcccagctccagcgacaccgggcgtacgcccttggccgcggctttcatgatggcctcgccggtgccggtttcgccggtgaaggtgatgccgtccacgtcttgatgttcggtgaggaaggcccccgccgagttctcgccaaagccgtgcaccacgttgtacacgcccggcggcacaccggcgtcgcgcatcacttcgccgagcaaggtggcggtggccggggtttcttccgacggtttgaccaccacagtattgccgcaggccagcgccgggccgactttccaggtcatcagcaacaagggcaggttccacgggcagatcacgccaatcacgccgcgcgggttgcgcacggcgtagttgaccgccttgccgccgtcgggggtgtccatggtgaagctttcggtgggcacgttgcggatcaggtcggcgaataccttgaagttggccgcgccgcgcgggatatccaggtgactggccagcgcgtgcggcttgccggtgtcggagatttcagcggcgacgaactcttcagcgcgctgttcgatgccgtcggcgaccttgtgcagcaaggcggtgcgttgggcgatggtcaactggccccacggccccttcagcgcggcgcgcgcggccttgacggcggcgtcgacttgctcgcgaccggcctcatgaatctgaccaatcacgctgttgtcggccgggttgcggttgtcgaaggtacgtacgccctcgacccatttgttgtcgataaagttatgaaagtgctgtgtcatggttagcgctcttctcttgttatcaggttcagctcggcgtcgccggcggtgaggtagtcccacatgcgttcgaagattcggccgctgttggtggcgcgctggcgggcttcttcaaggcttaacagcggcgctgtgtctgccacgccggcagcgagcaattgcagttcgatgcgcgcggcgtcttcgaggtagaacaccaacgtcagggcttccaccagcgaaccgccgaccacgatggcaccattgccgcgcatcaccagggcctgggagtggccgaggtgttcggcaagggcagcggcttgcgtgtcgtcgcgcagcagttgcgggtcatcccacagcggcacgccgtccttgaaataggcgcccatgccgtggcgcaacttgggcgtgagcccggcgcacgacaggctcatcacctgcctcggcatactgcggatcaccgcgttgacctcgggccgacgccggtaaatctgctgatggatgcgtacttcgcccaataccccttccggcagcgggccgtgcaccggcaccacggtgccgggctcgccgggctggatcaggcccatgggtttggccgcgcacaccagaaagtgcccggcatccaggcgcaggctgcaatgcccgtaggcgtgcacaaaaccggcgttggccagggcccgcgcggccacccgcacctcagcgtgttggcttgcgctgctcatgccttgaactccggaatgtcgggcttggaaccccacgcacagaacgagctggtgaccagcggaaactgccggggctggtgcgtggcgtcatcttccggggcgatatggcttacgccggtggagtattcgtaggtcatgccgtccggcccttcgaagtacagaaacatcgctcccgacgtgggatggcggcccggcccgaacagaatcctgatgccgcgttccttgaggaaataccaggcgcgcatcacgtcatcgatgctttcgacctgatggttgatgtgctgcacgccggcatggctggagggaaacagcgcgatcttgtgatgcacctcatcgatgcgcagcagcggcgcttcgccgatgcggtcactgacgcgggcgttggccaacgtggtccaaaacacctcgtcgcgcttggcatcggtggtgcgcaaaccgatatggctgaacccggtgatgccggcgtcacgcgtcgcaaaataacggctgccactggcatgcgggcgcagcaccagttcgatgttattgccgctggggtcacgaaactggatcaactcgttgacgtggcgcacctcggccgcttcacggctgccatggcgcacggcaaaaccgtggtcttcgagcaactgcgcggcgtggtcgagttcgccaaggctggtgacttcaaacgcggtggtggtttcgcgcgggtcgccttcgtagtagcacagggtgtggtcgcggctgtcggaccgaaagtagatagcgccgttggcctcgcgcgccacttgcagaccgagcatctgcgtggcgtacaacttggcctgggcgaggtccgccgtgcccagacgcacatagcggatatcatgcagattgatcatgaaggtgcctcttggttttattcttgtctggacacaatcctcgtcgtcgggcacaaatagcagaagcaaattctggttattcaatctatttgatttggttatagtcatgcgcacggatctgaacctgttacgcgttttgctggccattcacgactgcggcaacgtcaccgccgccgccaagcgcctgggcatcagccaacccgccgccagcgccgcgctgtcgcgcctgcgccactccctcggcgaccccttgttcgtgcgcagcggcaccgccatggaacccaccccgagggcgcgcagcatcgttgaacgcacccgcgaagtgatcgccaccatcgaccaggaaatcctccccagccccaccttcgaccccgcacaaagccgcgaaaccttcaccttctgcctgagcgaaatcggcgaagtggtcttcctccccgccctcttcgaccgcctgcgcagcgccgcgccccacgccaaaatccactgcctgagcctcggccccaaagacctccacgacgccctgcgcgaaggccgcgtcgactcagccctgggctacttccccgacctcgacgccccgaacatctaccagcaacgcctgttctcccacgacctcgtctgcctcatcggccgccaccaccgcatcaccgcgccgcaactgagcatggaagaattctgcacactggaacacctgcaagtgcgcgacggcagccgcagccaggagatgtatgaaagctttctggcggagcaagggatcgaacgcaagatcgtgctgcagatgtctcactacatgagcatgtcggcgattatcgaacggtcggatttgatcgcggtgatgccccggtcggtggcgcatatttatgagaaacactcggcggtcaggatgattgagccgccggtggagataccgccgtatagcttgaagcaccattggcatgcacggaatcagaaggacccgaggcatttgtggttgaggagggaggtggtggggatttttggaggggagtgacaccgaggtgactgcatcgcaggcaagccagctcccacagagaagcagagccgaactcggtcaaaaaatgtgggagcgggcttgcccgcgatgagggtgtaccagccaatacatttgccactgatacaccgctatcgcgggcaagtcgaatcgtcgcaccgccgctcccacatttgggtcttcatttgtctgaaggagcgcaatctgctctaaaaaacagcgcttttgatccaaccactcaggtcggctactaggccgccttgctttagattttgatcttgatctgaggcgccccgttaaccacgctggccgcatgcaggcttgaagccgtgggcaacccggcaggacgccgggttagccgcgatgggccagggatggcccatggcggcggcccacggattcaagccggagtgcgggcacaccgagcgtgagcgaggtgccgagtggtggggcacagaccttttggttacttttggggcgtttgccaaaagtgacccgccgtaagggcggaaccaatatcagccgttaccgcaggaatggatatgtactcgttccaaaacaggtggccggcacaaagggtgtggtgaccacactggccccttcgcagcctcgctaaagctcgacagctcccacaggggatctcattggctcgaacaccgcgcctataccaccacctccttctccagcaccaacgtaatccccgtctgcgaatacaccttcgaccacgtattcatcgtcttgaaattatcatggttatccccgtccgccgggtccatgaaatccccgcccggacgcaacatcacataatgcagccccaccacaaacgtcgtgaccacacacaacgcccgacggttcgccgccatcggcggtggtgccccgtgaatcaccggaaaccccgccttcacacacaactcttcacatgccggatacaacgtcgccaacgccgtggccaaaaaaccctccatgtaaatggtcacattcaaccccagcgaccgcgccgccaacgccacactgtgtgggtacgaatacccggccttcgtcggatcaaacggcttgaccaccccgccggtcagcgccccggaagtcagcttgtacagctcgacctcacacatattggtgcgcaacgcatccgtcgccgatagcccgccgggcaacgtagcgtccagctcgacagctgcgcacaacaacgaagcagccccacaggaaaaatcaaaagcctgtttctttttagcagccggcatacacgcacttccttagaggttgtgcgggcttaacggcttatgaacggggtttattccccgccgtctggatgaatttttctttaactttggcctgcccgcgctggtacagcgcctccaccagtttttgccgctcatcctggggcaaattgctcgcaaactgcgccagggtgccgtccaccatcgcccgcagcgatgcgtcagcctcacgcgccttggccaattgcgccaccagcgcatcgcgatccagcgtcggtgcttccagttgcttgatcacacccaggcgcgcctcgcggccggccatgatcagcggctggctgtcggaacggttatggcgcagcagctcgcgcaattccttgcgccgctgcgccggcaacttgatcatcgcctggcgcagaccatgttggttgaccaccgcttcggcaggtttggccatcgccatccagtgataaaggccaccgcccacgccaccgatcaaaaacacgttgagcaataccgaaacgaccaaccagggtttgaggttttttgggatcattgctcggtttcctcggcgttgacggtgaagacgacgtcagcgtcgccctgatcgaagacgctgggcagcacttcggatgacaacatcggcagcggcgcgctcaacgaggccaccagcaccccggcggcgatgccggcaatgcctgcgccgaccaggcctgcgggcgacagccaactggcatagcgcgaccagaatgacccgcgtcgcggcgccgactggcgaatctgccgcgtcagcgccgggtcggccaaggccagttcgtaactgtccaggtgagtgtccagccagctcgcttcgcgcagcgcctcacgggcgctggcattaccgctgtcgagcagcgcctgggccgaggcccgctcggcaacgggccagcgattcaagcgggcgccgtaggcggaggccaactgcgcaaatcgttcaggtgtcatgattttccccttccctggcgggcgagcccgggtgtgtcggcaagttggctgcgcaactggcgtcgggcccgcgacagcaggctctccagtgcctcgacgctgatgttcatcagggccgcggcgtcgatgttcgacagctcctggtagtactgcagcacaatggcttcgcgctggcgctcgggcaaggccgccacggcggcggccatcctcgcactgcggtcggccgtttccaactgttcttccggggacggtgcgctgtccgccagctcaagcacctcgtcctcgtccagcgggcgttccttgcgacggcgcaaacggtcatggcacaggttgagcgccacgcggtacagccaagtgtcgaaacgcgcctctcccgcacgccagttggccgcgtggcgccagatcttcaggaaactctcctgggccacgtccctggcctcatcggcatcccccagcagccggctggcgagcgaaagcaggcgcggcagtttgcgcgtcaccatttcgttgacggctgcaggttcgttgttgccgatacgctccagtagctcaacgtccggatcagtgtctttcaatcaggtaatactcggtccgggggctagaggatgttcagtgaatccagtgcccttcgcgccaggcccagttcgggccacgggattcccagtgcccgggctcccagcgcccgccacgttcaaccacttgccagtggcccggcacccaggcgtaggcaccgccttcccaacgccagtggccacggtcccaggcatagcccgggcgttcggcggggatgatttcgacacgctcggcgggcggtgcctggcgaatgatcacttcggtttcggcaaagctcggcgtgctgacaagcgcagtgaaggccagcggaacaagcaaggcataacgcaatttggccaatgggctcatggcaactccttcagacggcgggcgaaaatgcacgcctctgatgggttgaacggcaagcacagaaaaatccgtcgcagccaaggtgaagaattttcccgcgaaggatcgaagagaagtattgctcaagggatagcggcgcttgatgaaatgtttgaaagcaggcgacggatttgtgcaggtggctgcgttcaacggttaacgcagcacccacccagaggaaatatcatgccccgtcgcctaacactgcttgtcgccgccctgttgattgccagcctcagcggctgcgtgatcctgccggaacaccggcattgctgctggcgctactacggcgccgtgtcgacccaggcagacaccgccaacagctaacccaccgccgcaaaaccacggcgcccggccttgagctcggtgcgcagttcgccaatcaggtttgagatggaacggatgctgtccagaccctggggcgacacccgggtgagcagcagatcgacacggccggacgtcggctcaaacacgcagatgcgcaacgagccgtcgctgttcaggctgcaatcgcaggacagcggcagaaagcccgaggccattatctggttgagttcggtgatggaaatcatgataaagcccccgtccctgggttctaccctgtcggtgtgatgcaaccagaatagataaggttttgcctgctactgaacaattaattcaaaagtgatacctgcgcctcattttgccctgaaaacgctggtgcactggcgccagaaaccaggcgagcgacctctcgtccggccgtctttggagggcttgactcaagccacggatcgcaagaggctcatggctctttgccttctcacgagccaccttccatgagcatcgcccccccgagcccgcccgacagtgacgtgtacaaaacgctgctggaatcgaccaaggccattccctggcgcatcgactggcaaaccatgaccttcagctacatcggcccgcagatcgaaacgctgctgggctggaccccgcaaagctgggtcagcgtggatgactgggtcgaacgcatgcacccggacgaccgtgaatacgtggtgaatttctgcgtgtcgcaatctcgcgccggcgtggaccacgaggccgattaccgcgcgctgaccgccaatggcgactatatgtggattcgcgacgtggtgcacgtggtgcgcaaggacggcgaagtgcaagcgctgatcggctttatgtttgatatcagcgagcgcaagaagaccgaagagcacctgatccgcctgcaaaaacagctggaggaatactccttccaggacggcctcaccggcatcgccaaccgccgtatgttcgacactgtgctggagcgcgagtgggccagcgcccagcgcagccagttgccgctgtcgttgatcatcctcgatatcgattttttcaagcagtacaacgaccactacgggcatatcaagggcgatgaagccttgcgccaagtggcgcgcaccctgtcccaggcggccaaccggccacgggacttcattgcgcgcattggtggtgaggagtttgtgtggttgctgccggaaaccgatgctgcctcagcccggcaggtcgcgcggcgctgcctgcatctgatctgccagcagcagattgagcacggtttttccccggtgtccaagctcctgaccttgagccttggggtcggcacccggaccgtaacgcccgacagcgacatgctcgggtttgtcgaggccgtggacaaattgttgtatcaggccaaacgcaatggccgtatgcgcgcggagtttgccgacagcgaagtttgacgccagggtcaaactccgggcaaaaaaaatcccaagtagctgatggaaacttgggatttaaaaatgcataaaccgtgggaggtgaacgcccgggcatcatatcgattgtcataacctgtaacaaggccatttaaaccctttcgtcggattaaaaacggcgtaagtcattcaataaccacacgttttttaaggaagccaacaggttaaatgccactttttggtgcaagttggggttataaccccttgcactaagccgtttcatttcccttattaaaacaaggttattacctgttatggcgctgttgtattggaataccgttctttcaattccttgcacgcatcgccgggttcaaggccgccaggtagtgcagcacgcgcaatattttcaacttgccggcacagcgtcagcctttcagcggcttcttcacgctggcgatcaacctcggcattgagccgcacaaaataggccccgagcagaaccgcgacgcacaccaccccgatcacgtagtagcgcgatttgtcggacgctggtggctctggcgggttcatggcactagctcgccctgctcttgcgataacgcacgtcgtcgccgtcaacgcggtcttccagggcccaacccaagcgccggtaaaatccgttggcgcggatctcgtcgcgcccgtcggtaatcaggaacagcgtttcatggcgttcgaacaaggccgcctcggttaccgccatcagctgacgccccagccccaggccctcgtaggcaggccggacaaacatcgcaaacacctcgccttgtgcaaggttagccatggagaacgctgcaggctggccgtcgacttcggcgatccatacacaaggcgcttcacgaatactctcagccagcacctgcggcgtgatgcccaagccggccaattgctcgcggctcaaatggttttgctgcaccgaagtgcggatggcaaagagcgtgtcgacgtcgtcctcggtcgccacgcgaatcaacatttgcatacgagcctccagggtgagggacgcaattgtatgcaaatagaaacataacgattgtcgtggttttgtaaaaaccgggttgagaggacaaaccggctcggcagaatattggggattcaatggagggcctgtcgagcttgcgtaacgctgcgaaagtggtgggccaagccacatttttatgggcagtaccgccgtcttcgcaggcaagccagctcccacactggaacttcattgctgacgcaagagtgccccgcacgacgcctcctgtgggagctggcttgcctgcgatagcgccagatcaggcgatatctttaccggcaatgcctcccccagtcactgaacagcccgttgctgacgacgaaactgccccggtgccagcccatgggctttgcggaaacagcgggaaaagtacgcttcgtcggtaaacccgcaacgcgtggcaatcacgccaatcatctgctcactgttgagcaataaggtgcgcgccagttgcatgcgccggtccagtaccagttgggaaaatggcttgccggtttccttgcgcagcaggtgggtcaggtagtttggcgacagaaaggcggcggcagccgcgtcggtcaggttcagcgtgggttcgtgcacatgttcgcgaatatagctctgcacccgcgccagcgcgtctttgcgcccgcgccgcgtggcattgttggcggcgaacgcctgcagcggttcggcatagcgctcacacaccaggccaatcagttgaaacaggtaacccttgagccgctcgcgggcgccgaaagtgcgctgggcatccaggctgcgcatatgcgccagccaggtttgcacttcgtcgaaggcctcatcatcaaggatgaaatccagctgttcctggaagcgaaacggcgacagttccggcgcctggccaatggggatgtcctccaggtccaatggatcacacgccaattgcggcagaaagaaagcctggctgaagttgatcagcatgaactcaccgtcttcgggatggggaatcacgtgcaggcgatggggcaggataaacgccagggctttgcgcggaaacggccgtacggcgccaccgatgtgctgcacggtgtcgccgccgaggttgatctggatctggaagtattcatgccgatgagggctggtcagcgccgcccgcccgcgtttgtcgcggatgtagaagtcggggcggtcgctgcgttgctccatgccataagtggtgacgcgggtgcctggcataacggtttctcgaatggcctgggcaccactttagcctcaaccctggctcagggtgaaactcaactcgcccagcccttcgataccggcgctgaccacatcccctggctgcaatacgccgacacctgcgggcgtgccggtgaagatcaggtcgccaggcttgagggctaccgatttcgaggcatggctgatcacctcgctgacggaccagatctggtcagccaggtcgccgacctggcgctgttcgccattgaccttcagccagattttcccggtggaggggtgcccgactgcgctcacgggttgcaaggcaagggtcggcgccgattcatcaaaggctttggcccattcccacggccgcgagagctttttcgcctgggcttgcaggtcgcggcgcgtcagatcgatgccgacgccataaccccagatgtgggaaaacgcttcttcagggctgatatccaccccgcccttgccgatggccaccaccagctccacttcatggtgcaggtcggcggtcaacggtggataggcgatcacaccttcggccggtaccaccgcatctgccggtttcataaaaaagaagggtggctcgcggtccgggtcgtgccccatttcccgggcgtgttcgctgtagttacggcccacgcagaacacgcggcgcagtggaaagcgcgcgtcgctgcccgaaattgccagggatggggtttgtgcgggggtgattacgtaatcagtcatggcttgtgcctcttcgtttacctggcgccagtatggccagcaacgcccgggcaaagttggacgggcttacgcagattttgcactggccggtgcttgcaggggcacgacaggcgggtatttgatccgacgttcgagacggccaggcattgttttaagggaacacgttgatcatttgtttagcgagagcactcgcagcagatattcgcgtggtgttgcgacagggtcaaatgtgtcggcgtgtgcataaaacggttcgacaaagtgcatcttgcaggtgcgcgccgtttgtacgaaggccggcataaagtccgacagccaatgcatgttataacccgccggcccatacgagcgctgcgcaccgccggtggtcaacgccaccaataacggcttgccggccaaggcgtaatgcttgccctcgacgccgccatggtgcgcccagccattcaacaacacgtcatccagccactgtttcaacaggctgggcatcgagtaccaatagaacggaaactgcagcacgattgcgctggcgtcggcgagtttcaggcgatcctctgccagcagcgtttgcggcaaaccggcgaaggtggcgtgccgatagcgctcatagaggtcgaccacctcaacaggttgcacaccggaaacgccttccagcaggctcttattaataaccgatctatctaaatcagggtgcgccgcaataaccacaatcatcgttcagtccgccttcactattaagttattttagttagtggctgttgatagtcatcaacttgccaggcgcagtgtataaccaggcctgcctgacgacttatgatcattactgatacgtgacatgcgttaaattgataaaaaacagtggttaaagcactaacacttattggtttaaccactgaacttttttatttacgcgccactttgtagcgcaggcaatcctgataaaaactttggcgaatcacctccggttttaaacgcgaatggctgtcgtaagtctgctcggtgatgcccatggccatcatgcgcatccatgacttggtgaacttgatggtctggatcttttgccgcgcggcatacagtgacacgcccgacagcttgagttcctgggcccttgcggcagtgccggcgccccaactgcacatgtacttgtcaccctcgcgcagctcccgtgcctgcacggcagccgcgccgcccgccaacgagcaggcgatcagcatgattccaacagtgcgcatttgcttcctcacctaaccacctgaaaataaaagtgattctggcgagaattttgttacagaggggccattaaattgccttatcgcgcaatgtttcagctcgccgctgctggagtggtgcggaaggtaatgccgaggcgattgaaggcattcatcagggcgatgccgtaggtcaggtcggcgagttctttggcactgaactcagcggcggcggttgcgtagtctgcgtccgaaacagcgttgcgggtcacggcctcggcgaaggccagggcaatgcgctcgcggggggtgaatacattacgggcgtcgtgccacaccggcaccagcaccagcttgtccacggccaggccttgtttgagcaagtcccgcgagtgcatgtcgatgcagaaggcgcagccgttgatttgcgagacgcgcaggtagaccaggtcgatcagcgccttgggcaggccgctgttttgcaggtagacgtaaacgccgccgaaagccttgtagccttccggggatgcttgggtgtaatcgaggcgagtggtcatgatgaatcctgtaggggttgagtgaaggggccagtgtggtgcgccatggctcacccctgaagagccatgaatgcgcctgatgtctagaccatgatggcctagccgcccagcgcatttatggcactgttgcctgggtcatgaagccgttagagtgaaacccgccgcgacctggataaacgtaccccatgcaaaccctgccaccgctggaccccaccgccgccgaacctatctaccgtcagctctattggcgctttcgcagggcgattgccgacggtttgctcaagcccggcgagcgcattcccgccgcgcgggcgctggccaaggagttggggctggcacgcggcaccatcgacaatgcctacgccctgctcacggccgaaggctatatcgagccccgtggccaggcgggcaccgtcgttgccagaggcgtgcaaaccaccctgcccgcccgcgcagtgatcgcgccttaccaggctgcacggcaacagcaaccggtgctgccgttccagatgggcctgcccgcgctcgatgcgtttccgcgcaagatctggtcgaaaatcgccgcccgctgtgtgcgcgccacgcaactggcggacatggccaacccaccggtccagggcctgcccgcgttacgcacggcgattgccagttacctgcaagtggcccggggcattgactgcgcgccggagcaaatctttgtcacggcgggctatcgcaacagtctcggcctgatcacccacgccttgctcaagcctggcgacaccgtccaggtggaagaccccggctatcggccaacgcgtccgctgctgacgcacttacagattaaaacccgcccggtccccgtggatcaggacggcctgtgcgtgcaacaactcggggaggcccgcgccgtgattgtcacgccggcccaccaaagccctctgtgcgtatcgctgtcattgccacgcaggctgaacctgctggagtgggccagccgccagcaggcctggatcatcgaggacgattacgatggcgagtaccgctacgtcagccgcccgttgcccgcactgaaaagcctcgaccgcgacggccgtgtggtctatgccggcaccttcagcaaagtgctgttccccggtattcgcctggcctatctggtggtacctgcggcccaagtggcgcgctttgaacaggtcagccagaccttcctcggcaatagccccgaactgacccaggccatcctcgccagctttatggccgaggggcatttcgcccggcatatccagcgcatgcgcaagctctatggtgaacgccgcgaagccacggcggcgggcctgcgtaaggtgctgggcgagcatatttgcattgatacgcaacccggcggcatgcacttgattctgcggctcaaggcgtcgcagtcggaccgtttgctggtggcaaaattggcgagcgcgggcatctacgcggaagccttgagtgaatggagcatccatcaacaaaccggccccggtttactgctgggctttgccaatatcgactcccaggcccgcgccgaagccctgggccaacgcattctggaatgcctgatggcctagtcatccaaccgccgcttggtactggccaggcaggccatccggcgcgacactgcggtgcttgcccccaaccctcaggatcgaccatgcgcagccttacgattttctgcggttccaacttcggaacagacccgcgttacgctgaagacgccaaggccttgggccgtgaaatcgcccggcgtggcatccgcctcgtctacggcggcagcgccaaaggcttgatgggcgtgatcgccgagagcgcacttgccgaaggcggcgaagtggtcggcgtgatcacccgcttgctgcatgacctggggcacatgcacccaggcctcagccgctatgaggtcaccgaagacatgcgcagccgcaaagcgcgcatgagcgaaatggccgacgcgttcatcgctctgcccggcggcctgggcacctttgaagagttgctggaagtgatgaccctgacccagttgggcgaacacagcaaaggcgtggcctgcctgaacacggcgaacttcttcgcgccgctgcgcagtctgttcgagcacggggtgaaagaaggcttcatgaaagccgagcacagccggatgctgctgctggaagagaaccccggcaccctgctcgatgcccttgagcggtggcaggcgccggtggtcacaaaatggatcgaaccggtcacgggttaaaccgtttcggccttggcggtgctgctcccgattcctgtcgccaaggccttttttcacctcaccactggtaggtcgcgctcgcctgcacggtacgctgcgagccataccagcaccacgaataggaatagcacgacgcgacatactccttgttcgccaggttagtggcgttcaacgccaggcgcaggttgtccttggggttggcgatgttcgggatgtcgtaatgcaccgccgcatcgaccagggtgtagcccggcactttcagggtattggcggtatcgccccaggacgaacccacataacgcgcgccagccccgacgccgaaacctttgagctggccgtcatggaaggtgtaatccgcccaggccgacgcggtatggcgtggcacaccgtaggtggtggtgccttcgacgggaatcgccgggccggtaccgatgtcgctgatcggcgcatattgcacggtgctgttggacttgctcgcgcggttgtccaggtacgcataggccgccgtgatgtcgaggttatcgttcaggctggccttgccttccagctcaaagccacgggattgctgctcgccgtcctggatactgcagcggccgttgccacacaggtgcgtagggtccgggtccatggtcggtacgttgctctggcgcagatcgaaaatggcggcggtgataaagctgttgctgccgggcggctggtacttgatgccgatttcatactgcttgccttcggtgggcttgaacaccgaaccgccgtagcccgtgcccgactgcgggttgaacgactccgcatagctggcatacggcgccaggccgttgtcgaacaggtagaccaagccgacgcggccagtgaaagccttgctgtccagcgacgacttgctcttggcgccgctgctgagcgttttggtggtgctgtcggtgctggcccagtcatagcggccgccgagcaacagcacccattggtcccacttcatttgctcttgcaggtagacgccggtctgttcactgcgggaagtggcgtcggtgctgaacgcgggcgtgaccaccggcgcgccgtagaccgggtcgaagatatccagagtcgggcctttgccgtagccggtcttggtgtctgtggtgatgttttggtaatcgaggcccgtcaacagcgtgtgctgcaacggcccggtgtcgaatttggcttgcagctggttgtcgagggtataggcgtccatatcgacatcagcggcgatggtcgagcggttggaggtgcggtaatcggcctgcaagttgctgttgtaaatactgcggtagatgccctcagcgcgcatataacgggcgttctggcgcacggtccacacgtcgttgaagtggtgttcgaaggcgtagccgagggagtaatgctcgcggtcgcttttctcgaagcgtttttcaccgtcgtagaaatccacgtcgatcttgcgcccggtggggctgcgcaataccgagccccaggcggggaccgagccgtaggaagcgccctgggggtctttctggaaatgcccgagcaaggtcagcgaagtggcatcgtccgggcgccaggtgaaggcactggacagcgattggcgacgggtttcggtgtgctcgacctgaccgtcggcgtcgtcgaaaaggccagccacacggtaggaatagataccctgatcgtcgatcgggccgctcaggtcgaaggtggtgcgcttcttgttgaaggtcccgtattccacgccgacttcatgaaagggtgtgtccagcgggcgcttggtgaccatgttgatcaccccgctcggcgtgccctgcccgtacagcaccgaggccgggccgcgcagcacttccacgcgctccaggtcgaacgcgtccttttgcggcgaggcgtcacggctcgacggcaagcgcaggccgtcgaggtaagtggccggggcaaaaccacggatggtcaattggtcaagacgcgaagccgtggcgccacgggtttccgggaccacggcagcgctgtagcgcaggatctggttgaggctctcggcattctgcgcgcgcatctggtccttggtgacgatggaaatcgactgcggcgtctcgatcagcgcggtgtcggtcttggtgcccgacaggctgcgcgtggccacataacctgccactggcccggtggggctttcgctttgatacgcgccgttgatggtggtggcctgcaactccatggcgccgccgttatccggaacgggctccaggcggtaacgatcggcggaaatcttcaaggcctgcaagccgctgccagccagcagttgagtcagcgccacgtcggtgtcgtattgcccgctcagcccattgctgtgcttgccccgggtcaaactcgcatcaaacgccagcaccagccctgcttgttcggccagactattgagcgcctggctcaagtccccggcggggatcgagaagccgcgcaaggcgctgctgctgtcttgcgcaaaggacggctggacggtcagcaacggcacggcagcaaaggcgaacgccactgaaaaggccagtggatgcaagggacgagcaaggcgcgacatgggaaatcctgcgtaatggaggttctattaacagtgacggccaagtctggaaatcgggcaaggatgagagtcatttttatttgtgcagcttcctcgcaatgagtcgagtcgcttttttgtgtagtcctgcgggttagtttttcgcggctttttcccgcctcacgtcatcccattctgatttttccaaccgttcatccagccactttttgctgcggcagactccggcgccttgccttttttgccgagacgtcacggatgaccaacgctgcccacattgccctgatcgaacacgaactcaatagctttcatcagagcctggccgagtatcgccagcaggtgggcgcctggtattcgcgcgcgctggattcggtcagccatgccacggactttccctcgctgctggggatggagcgcgtgttgcgggtggggagcgtttcagccacacgtcagcgggcaatgtgctgatgcacgaccggccggggccggacattgtggcgggaaaccgcttggcgattcagggcgatcatcattacgactacgacgccttcggcaatctgatccgtgaacgacgtgggcgtgaacatcggttaatcaccgagtatcgctacgactgccagcatcggttgatcggaatcacccaaccagacgggaaaacggcaagctatcgctacgatccgtttggcagacgcatcagcaaaacggttgatggcaaaaccaccgaatttttctggcaaggcgacaaactgatcgccgaacaccacgccgaccgccaccgcagctatgtgtacgaaccggatagcttccgcccactggccctactggaaggcttcggcccaaaagaaaccaagccctaccactaccaactcgaccacctcggcaccccgcaggaactcaccgaccccagcggcgaaatcgtctggtccgcgcactacaaggcctacggcaaaatcagccggctggacgtcagcaaaatcgacaacccgctgcgctttcagggccaatacttcgaccccgaaagcgacctgcactacaaccgccatcgctactacaatccggatctgagtcgttacctgacgcccgacccggtgaagctggcgggtgggatcaatgcgtaccagtatgtgcctaatccgacagggtgggtggatccaacaggactgagttgtacaaaagggaattgcccggggcagaggaaaaaaggatcagcgcaaaatcatgaggaaaagtctccggatacaagcaaccccatacgctcttctacttatgaacaagcttcaaataaagcgttgaaatggttgcttgaaaatgattttcgcgctgaaaagccaacgccgggaagattcggacctcgcaagggagagcctgtcggaatgcaaacagatgatggcaaaactggctaccgtgtcgaacatgacaatagaagtggcgcccacataaatgtatggtcaggaaagaaaaaagggccgcactatctttttgatggtgaccaagaactggtgttccaattgacaaaaaggtttgcaaaaaaaatgagctacctagacaaagaactgattagtgatctgaaaaaacacaatatcaacttcgcagtcctatctcaggcagagcatgaattcatggtcagtgaaatcaatgagcggcttccctttagcggaaataaaattgcttggagcactttagataacagtattaaacttggcttcgagtcaactggcatggcgatagaattacttgctgcagaaattaaaaaggtagctaacaataacttaatttttatcggtgactctgcctgcgacgacgcctactcaataagcattgaacatataaaccaagcactcgggattttttccgagctacctcaacacacctatattgtgtcaaagcccatcagctggattgcctgtatctcatttgaggggcatttggactttgcaaatctttacaatgagtttaagtaaccaacccagcagcttagccgtagggagaatagagctaccaaaagcaagcaggcgtagaggtgacagataaataaaagctaaccgcccagagggggtcgaaaactcaaacagggatttctttagaaaacgcccaacctcacccccacgccaccaccaacaaccccacccccaacaccaagcacaacggcgaataaaaatatgtatccagccgcgcaaacctcgacccgcccactttcttgaaaaaccccaccaattctgaatccccaatcgccctggcaaacatcaccagtgcaatcgcactgataccccactgcagcgcgccatgggataccggcgagaaatacagtccagcgcgcaggcacacgagcaaagcaattgcgaccaaccccaatgccaccaaaaacgtgcccagtgccgaaggcttgaatgcaggccttgggcccctggcaaattcgcctggcaattgcggaatagccgccaggctgccgagcttgccgcccgccgcccagtacaaatgcaccatgctgatgcaggcaaacactccgacaatccatcgcgcgatgacaaagctcatgactgacgctccctgaaatgtgcgaatgaggatagtcgccctgagattttttgtaggcatttcgtcggcggctgatggtaaagtgccgccccatgaaaatcgcccgtgccgaccgctcgctcattgcctggatgctctactgctgcgtcctgttcaatgtgttcgcgtgcagcattggtcacgggcagatgctggggatgcaactcaatgggatcggcgggcagttctgtaccgtagaccctcgcacccaggcgcccgcgtcaaaaaacaccaccgatgaaaacctgccgacactggccaaggcctttggttgcccgctgtgttccaccggcggcatgggcccggcgctcaactccagcctgaatgtggcagtactgccgcaaccccacgcaccgccccctgcggtggtgcttgccgctgacatccctgcccgtttcacctggcccacggccaacccgcgcgcgcctcccgctttcgcctgagcccttcgctttctgatctgcacccgccaacgcgcccaatggggatgcgtgcggctgtgcgttgttttcaagccaagtttttcaggattcaaccatgaagcatttacccctgttggcgggcctgttcggctgcctgcccttctgcgcctcggcaattgagctggcccccaccaccattgatggtgagcaaactgccgagcccggcctggccctggaccaatccagcggcatggcatcgcggctcggcttgagcgtgcgggaaaccccggcgtcagtggccattgccacgcgcaacgacattgagcgccatggcgccaagaccttccgcgatgcggccaacaccctgcccggcgtcaacgccagcgcgccgccggggtttggcggttttgtgtcctaccgcggctttaccagcagccagataacccagatgttcaatggcatcaatgtcgctaccggcctggcgcggcctgtggatgcgtggatctatgaccgggtcgaactggtcggcggcccctcctccctgatcaatggcgcaggctccgtcggtggttcgctgaactacgtgaccaaactggcgacccgcgaagaacaggccgccgaaggccaactcacctatggcagctacgacacggccggcgtggcttttggcctgaaccatgcgctgaccgagccgggtgccgaggtgcagcactatgcgcgcctggacgtgagccgcaacaccaaccacagctacattgaccgcgaccagcgcgatgcctggagcgtggcgttttccctgctcagtgatttgacgccagacctgtcccataccctcgcactggaatatcaggatgaacacgaggacagcccttattggggcacgccggtgctcaaccccaaggcgggcgagttgaaaatcgacaggcacaaccgcttcaacaactacaacgtcgccgatggccgttacgaacagcgcacgctctgggcgcgctcgatcatcgactatcggatcaacgacagcaccacgctgaaaaacacgctgtatcacctggacagccagcgcgactaccgcaacctggagacctaccagtacaacgccgacaacagcgcagtgaaccgctctaccgcttaccaggtgcgccatcaaggcgaacagaacggcaaccagttcgagctgcgtcacgacgacagcgtcttcggcctctcgactaccctgtccggcgggtttgagtacaaggtcaacagcaccaccaacaacccgttgaatgtaccgggcaacagcacggtggatccggacaactacaacccggggcacttctacgatatccccgggaccaagccgggcttcgtcaaggacaagaccaacgcggtcaccaccaaggcactgtttgtggaaaaccgcctgggcctgaccgacaaactctcgctgctgaccggcttgcgctacgacgccatcgacctggatgtgaccaaccaccgcgtgatcacggccaccaacccacggcacttcaagcgcagttgggaaccggtgaccggacgggtcgggctgacttaccagttcattccgtcagccaatgtgtacgtgcaatacagcaccgccgccgaacagccttcgaccaccacgcaggtgtttgacgtatcgaccggcaagcagtgggaggtcggcagcaaattcgactacctgggcgggcgcggctcggcgaccgtcgccgcctaccggatcgagcgcaaggactttgccgtcaccgacccgctcgacccgaacaacagcattccggtaggggctcaaacgtccaagggtatcgagctggccagctcactgcgcatcacgccccggctgctggccgaaggcaacttcgcctgggtggatgccgagtacgacgacttcaacgaaaaaatcgccagcggcgccgtggtctcccgcaagggcaatacgccgaccaatgtgccaaagcgcgtgggtaacctgtggctgacgtatgactttgccgaagactggcaaggcggtgtggatgcacggtatgtggcccaagtgtatgcagataacgccaacacacagacggtgccggcctacacgctgttcgggacgttcctgcgctacaaggtggactcgcacacctcggtgaccgggcgggtgcgcaacctgacgaatgaggtgtatgccgagtttgcgcatgtgtcgccggcgtattacctgggggcgccgaggacgtttgagttggccgtgcagaccaggttctaaagtctaaaatacagtcaatgtgggagcggcggtgcgacgattcgacttgctcgcgatagcggtgtgtcaggcgaataatctgccggctggctgaccgttatcgcaggcaagccagctcccacatttggatcgtcatttaacaggcggatcggcggttacttgaggctcgcctcaaccttctgcgccacgtcctccgtcagccacgctttccatacttcaggatgctccttgagaaacacctgcgcgacttcacgcggcgcggtgtggctctcgctcatcgccgccaaggccttgttcaacggttcaatcggaaactgcactttggtaaagaactcggcgatctgcggatgttcctgctggaacggcgtcgacacgccaatgctcaacttggacgccaaggagcgtgtcggcctggggttggggttatccgcatcggtcagggtcttccaggcatcggcgtcaaagggcggttcttccagctggatcaacttgtagcgccccatcagaggcgttggcgaccagtagtagaacagcactggcttgccccggcggatcgacgaggcgatttcggcatccagcgccgcacccgagccactgcgaaaattcacataactgtcgttcaggccataggccttgagcttctgcgcgttgaccacttccgaggtccagccgatcgggctgttgagaaagcgcccctttccgggagactccgggtccttgaacacatccttgtagcgtgccaggtcctgcacggtcttgaggtccggcgccaagggtttgagacctttggccgggtcacccttgaccacgtattcaggcacccaccagccttctgtcgcgcccttgaccgtatcgcccaggcccagcactttgccttcggcctcggccttgatccagaccgggctgcggcccgcccactcctcaccgatcacctggatatcatttttcgccagggcggtttccagggtgatggtggtaccgggcaaggtatcggtcggcaggtcgtagcccttctcgacgataaaacgcagcacttcggtgatcaggctgccgctttcccagttcaggtcggcaaaatgcaccggcgccggggctgcggatacaggtaatgacgccaccgacagactcaaggtcgtcagggacgcagccagcagggttctcaaacctttcatgcgttgcacctcgcgttttcgcagcaaaagcggtgggctttgctgcctatgcgcgaagcctctgaatagttaagtcaactcaactgtagtagaggttccgggagagaaggcatgcacgcgcagattatgaattactcgctggccttgaacgtgaccagctcacccttgcgccacttggcggccttgccggtgacggccttgagggttttggtcaagccttcctgcaattgctcgttggcggcaaataccagcatgacgctgtggccttccttgaagacaatgccctggccttcggccgaggacacaaaggcgtaatcacccaggccatacaccgtcaacttgatatcgcgaaacttcaattcgaacttgccgccttcccggctgggcaacaccgccgcacgaaaatggtcgccgaccttgagctccagacgtggcttgtcatccacaaccaatgccgactcggtgtcgatctcggcgatgtagatgccttccggcgtctgttcggtgatgtaaacaaaacgggattgaaactgcttgaccaactttgcgcgcaaatcacccagcacgaataacgcgtgcatatccagattactgactgccaaggaaacgcccccacatcaaaaagagcgctgaccaccgaagcgggcagcacaaaaaaacggccctcaggcacgatcactcaacacattctttaaaaactgaagacggtcccactgctgcactgcaagactagtacagctgtgcacgatggaccttgcgagaggtcatcgggcaacacaggaaatcacaggttcaacgacccgagaacacgagccgacctacttcagagaataacccaattaaaaacgccgtttccgacaaaccttacattaccaaacatttggcatggaaccaggcatcgcctgccagcgacaatattagaacagcagcgcgggccaaaccagccgaaacgctgcgggtgactcaacacgatcgatcgaaaggagctgaccatgcaaccacgccaacacgccgctgcgtcttcccacactcgttcactcagccaagacgagcgccaatactactgcctgaataacaccagcgggtactccaattccgttctttaccaagtcgtacctgccgggcgtaatttctttcatatccgggaagtgatcagcggcagggtcaaaggctttcgcagcgaccatatcaaggcctgtacgttggcccaagaactggaggccagcctgcacgccctgcacggtgcaatcgtttcgtcacctggatgactttaccgcgccgccttcgcccaacaactgccatactgccccgtccattgaagtttgccccttgcgggtcaggtttcatcagtgcagtgaccttgatgcagttaacttgaagggaaggctatacgtgacggaatttgatattggcgaatttttcatccatggcgatgccagggaaatagacggtgagttccaggcggtcatcatcatgcgggccaaaccaccgctgaccaccatcacaacgcaccaggtcgagaaagatcgctggttcaaaaccgtcgacgcagcctcactcgcggcgaaagaggccgccagggctctgaaaactgccgtggacgccggcgctctcaattcctgagcatccgatagaactctgccgcgcccctgccctcacatgcacaacgaccatcaccttgcatggagaatgatctatggacgcgccaattcccacccttgaaaccctgttcgaacaactcggcctggactccacacccgaggccatcgacgctttcatcgttgcgcacccgctgcccgaagccgtgaagttgatcgacgcgcccttctggtcgccgcaacaagcgcagtttctcaaggaagaactgcgcgaagacgccgattgggcaatagcggtagacgaattgaaccagcgtctgcaccagccgcagtaaagcgcctcaatgcaggctgtctgactgttccagccgcatcagcgcttgccaggcagccctgcactcttcggcttcatcgcggctggcgaacgccgtgccgcgctgctcaccattgagcaacaccacccagcaggctttctggcccagcgtacgcagggtttgaggtacaccactgccgatcatcacggcaacatcgaccttgttttgcatggagcttctccgcagcattagttagctggctaacaatgttgaccatgctacggttttcttccagttggaaaaagctatccacggaatagctccattgcataaacagcaacaatccctagggtttggcctttgtgccttcgggtttgtagcccaggcgcaaaccaccccagtgccggcccttgaccatgatcggcaccgacaaatcatgcatcaactcacctgtgtcacgagtgtaagtctgcaacagcacggcttgttgatggctgccacatcgaatgcccgtacggtcttcgaatttgcgcttggtgcggttctgcacggcgtcaacctgggcgtcccccgtcagagcgtgggaaaacgccttgttatgtgtcggcacataaccctggggagtacaggcaatggcaaataccaggccctcatgccgtgtcagcaacgcgtcctggattgccggcagcacttgatcggtataaccatcgaaccgtgtgtggtatttgctcgggtgggtgttcgggataggcgtatagctgcgatcaaacaagtcatccagacggatacggcgttgcagcacgtcggcctcgaactgttcggcaatgcggccggcaccttcgcgggccaggtcgtagatgcgctggtggtagtcatccaggccgacttgcgccaggcgctcactgatggtttccgcctgaccttccatttgcactgccgcatccgccaattggcgggtctgctggtcgctcaccgacaaatcgctgcgcatctgttctacggcgtggaacaagctgtcgagctgagcgcggttggtgtcggtgccctgggcgatttcattcacctggccttccacatcggcggccaggctggcgatgttttccaactgctcgccagcctgctccacttgctcgacgccgatgtgcaggtctgccgacagttggcgaatctgctccaccacctgggcggtgcgttgctggatatcgacgaccatcaccccgacctcatcggtcgccgtggccgtgcgcccggccaggccacgcacctcgtcagcgaccacggcaaagccgcggccgtgctcgccggcgcgcgctgcttcgatggccgcgttcagtgccagcaagttggtctggctggcgatggattggatcaccagcgtgacacgctggatttcttcactgcgctggcttaacgcttcgatcagttcgcggctcgcgttcgcacgctggctgagttggtgcatgcgggtgatcgactgggcgagcacttcacgcccctctgtactgcgctgatgggcttggctggccgcacccaatgcctgccggctgagctgggaagtcacctgctcagtgccgatcatcacctcggcactgctgacaatctgctttgccgcacccaattgtgactgcaaacgcgccgccaactgcttgaccgaaaaagccacgcctgcggcggacaacgcattatggctggtggtgtaggaaaggtcgcgagtcaactcgcccatggcgtcgacaaccggagaaggcttcacgcgaggcgttcggcgtttaaacgcaggcagccagagcaccagcacggccactggcaggcaaacgtagatcggcaagccggcaaacgccaggcccagcagtaccagcatcagggcgatgctctgcataagcggcgtcagccagccgggcagcacgcgcaccaccgtttgcggtggcactgctgtgcccatcagagatccgtctccagccatcgtcgttaccccactgcttgtcgttattgtttgcgcattaaacgccactatctggccattatccatgggcctttggtggggtggcttgcagcagatcaatagacgtgggtgtaaccggtatttctgggcgccgccgctgcggcgcccgagctcaacgcatcaggcttggcgctggtgcttgtcgatctgctcgtggcgctcttgcgcttcgatgcagtacttggtggtcgggctgatcagcaggcgcttgaggccgataggctcaccgctgtcgtcacaccagccaaaagagtcttccttgatacgctccaacgcgcgctcaagctgcggcagcatgcgctggtcgcggtcgatggcgtttaccagccaggtgcgctcttcttcaacggaagcagcgtcagccgggtcggccggggtgtccaggctttcaatggcgatgcggttctgctcaatgcgctcgtggtgttccactttcatgtcttgcagcaactgctcgaaaaaagcgtgctgttcggcattcatgtagtcatccgccggcatggccagcaacttttcctttgtcattgatttctctataaaaaatacgtgcattaaggcgaataagggagcgttccggtcgacctctgcaggtctcggaaaggcgccatccattccaagcgccacccggcactcaatttacgaggggcggcagtctaaggccgacttgagggcgcagcaactgaaaagacaggcattttttccgagataacccccaaaagcaccaggacgggctcggcgaatggtcatcggagtgcgtttatagcaagaaattcagtgttgtggagctatatagaagacaaacggttagaagggcctgataaagatcaaatgtgggagccgggcttgcccgcgatgcaggcgactcggtccgtcagggctaccgagttgatgcaatcgcaggcaagccagctcccacacttgatttgtgttcgtcgcaagacgatctcagcgtttgagtttgcgcttgttgcggtactggtcgatcaccaccgcgatgacgatgatcaggcccttgatgatgtcctggatatacgcgtctaccccgacaaaggtaaacccgctggccatcacgcccaggatcagcgcgccgatcacggtgccggtaatgcgccctaccccgcccgccaggctggtaccgccgatcaccgctgcggcaatcgcatccagctcataggacatgcccatgccggcctgcccggtcgcggcccgtgccgaggccaccacaccggccaggcctgccaacaggccggcaatgctgtagacgatgatcaagtggcgcttgacgttgatgcccgaggtgcgcgccgcctgcatgttgccgccgatggcgtaggtgtatttgccgtacttggtgtaacgcagggcgatatggaagatcaccgccaccaccaggaagatgatcaccggcatcgcgccatggccgatggccgtgtacgagtccgaaagcatgctcaccggctggccttcggtgtagtaacgcgccaggccacgggccgagaccatcatgcctagggtcgcgataaacggcgggatgccggtgactgcgataatgctgccgttgatcgcccccgccagcagccccacgccaagccccatggccaccggaatccacaccggcaagtcggtcaggctggggaacaccgcccgggaaaagtccgaggtttgcgccaggctggcggcgatcatcgctgacagcgccagcaccgagccggatgacaggtcgatccccgtggtgatgatcacctgggtcacgccaatcgccagcaaaccgatgatcgacacttgcaggatcatcaacaccaggcgctgggagttcatcaaaaagctctggtcgcgcacaatccagccgaacagttcaaacaccaggccgatgccgatcagcaccaggaagatgctcagctcggtcggcaagcgacgccggtgcttgaccggtgccgtggcaggcttgttgtctgttattgcgttcatagccaatcaccttcttattctgtagtcagtggactgcggtcataccggaagccagctgcatgactttttcctgggtcgcctcgctgcggtccagggtgcccatcaggtcgccttcgtgcatcaccatcacccggtcgctcatccccaacacttcgggcagctcggaagaaatcatgatcacggccatgccttcactggccaggaaggagatcaagcggtaaatctcggccttggcaccgacgtcgataccacgcgtgggctcatcgaggatcagcaggcgcgggttggtcatcagccagcgcgccagcaaggctttttgctggttgccaccggagagcgtgtcaatgcattgctcaagggacggggttttcacccgcagcttcttgcacatgtcttcgcacagcgcgcgcagggctttctgctggataaaaccgttgcccgaataatgcggcagcaccgccatttccatgttttccagcaccgacaggcacgggaacaggccactgagcttgcggtcctcggtcagcagcgcaaagcccttttcaatcgccatgtgcgggtcggtgatacgcaccggcttgccgtcgagggtgatttgcccgccgctgcttggggtgatgccgaaaatggtttctgccacattggtgcggcccgagcccatcaagccggcaatgccgagaatttcaccggcgtgcaggtcgaatgacacgtccttgaacaccccgtccaggcgcaggtcgcgcaccgtcatcagcagttcaccgatcggcgtctcccgcaccgggaacaactggctcagttcgcggccgaccatcatcgagatcaggctgtcgctgttcatgctgtcggcgcgttgcaggccgatgtaatggccgtcacggaacactgccacttcatcggcgatggcaaacacttcgttcattttatgggtgatatagacgatgcctttgccctgggatttcaggtcggcaatgatcgaaaacaggtgagccacttctttctcggtaatggccgacgtcggctcatccatgatcaggatgtcggagtcataggacacggccttggcaatctcgaccatctgccgttcggcgatgctcaggttgcccacgtgttcctcggggtccaggttgatgcgcaagcgggccagcaattcggcggtgcagcggtgcatttcgcggtggttgaccatatgcaggctgttgagctgctcgcggccgatccagatattctcggcgatgctcatgtgcggcatcaggttgagttcctgatggatcatcgcaatgccggccttttgcgccgccagcggggtttcaaacacgatcggcttgccgcgcaggcgaatttccccggcgtcgggctggtagatgccggcgatgattttcatcaaggtcgacttgcccgcaccgttctcacccatcagcgccagcacggtgccggggcgcacccgcagttgtacatcggccaaggctacaacgccgggaaagcctttgctgatattgacgatttccaacaggtagggttcttccagcactggtggctggatacccggaggctgcgagacagtcgcttgagcgagcatagaaggtactccatctgcagggcggccgaagccgccctgccggcttattgttgttatgtcagggctacttgaagtctttgacgttgtccggggtgatcagttggaacgggatcaccacgttctgctcgataggctcgttcttggccatcttgcgcgccgtctccaccgacttgtcggcctggcccttggcatcctggaaggccgacacggtcatgtcgcctttggtgatcgcgttcaggccgtctggcgtaccgtcgacaccggcgatcaacacgcctttcttgcccgccgacttcagggccatggaggcaccgatggccatctcatcattgttggccaacaccgcctggaagtcgcgaccctgggtcaaccagtcgttgaccagggtcatgcccttgtcgcgcagccagataccggtctgttcctgctcgaccttgatgcccgggtatttagtcagaacttccttcacgcccttggtacggttggtggtggagttgttcgccaggtcacccagcagaatcacgatattgcccttgccaccgagcttttcggcgatgtactgcatttgcagtttgccggcctcgacgtcatcggaggtcacggccgcgacgcctggggccagggtcgggctgtccggacgacggttgacgaacaccagcgggattttcgccgcggtcgcagccttgatgatgttcgcggtcgacgcggtgtccaccgggttgacgatgatcgcgtcgaccttctggctgatgaagttctcaacctggctcagttgcttgaccacgtcggcgcgggcgtcttcgaactgcaactgcacgccatcacccttgggataggacttggcttgcttgtccatgtcttcacgcaggtaggtcaggaaggtgtcatcgaaggcggacatgctcacgcctatcttgaggtcggcagccgaggcaaaaccactggccagcatcatggacagggccagcgcggtaaaacggatcggggtcttcatgaacggtctgtctccacatttttgttggttttgttggacgttacgttgatcagaacgggccttgcgaagtcggcagccgaaccaccggtgcgcctggaatgcagcacaccaaggcgcctttgttttcgacgcagagcacattaaggaaggagaagtaaaacggccgcgcgcggggcagaccgcggggtgtgtgggagaggcgtaaaactcgcagtacagcgttaaagattttcatctgacggtacctggttgtttttgatcttgtttttgttgagccgcgcgaatcgggttcgagcgtactttctgcaacctggaaaagactttattggaaaattaattccatatcaacacaatttggaattttgttctatttttctggaaaacccctacaactgctttgtttcgaccacctgttggcgctcgtgactgaggcgcgcggcgtccaatatacgcgtggtttccagcgcgtcacaggcgtccaccggcaatggcccctggccttgcaccgcactgtgaaactggcgatagaactgggtccagcagcctttttccgacggcacccgttcgcgctcctcgccttgttcaaaccagccccagcgccggtgttcttcggcgccccagtgttcgccttcggtttttggtgacttgcccgccagcagcagttcttcctgaccgtccaggccgtcgacggtgtagcaaccgagggtgccactgacccgaaaacgcggggcctggctgttttgcaacgcattgccccacaggtgggaaatcacgccgttggcgtgggtcagggaaacgaagaagccgtggtcgagggtcgggtgctccgcgctgaactggagttgcgcaaacacccggtccaccgggccgaacagttgtatggcctggtccaccagatggctgcccaaatcgcgcagccaaccgccaccactggggttgcccaccgcttgggggctgtaacgctccacgcgggattcaaagcgggtgatgtcgcccagggcgccggcgtcgatgagcttgcgcaaggtcaggtaatccgaatcccagcgccggttctggtagacactgagcagcacgccctggcgctcggcggcggtaatcaaggcctgggcctgctccgcgttgctcgcaaaaggcttgtcgctgaccaccgccacgccgtgttcaatagcctccagcaccaaggccgggcggcctttgagggtggtggagatgaccagcgcgtcaacgccggcttctacaatctggccgatggagtcaaaggccttgaggccggggtggtccgttgccaactgctggcggcgttcgggtgaacgggtgaccacgccaacaaacgtggcgcctggcagcgtggcaatcagcggcgcatgaaagaagcgccctccgtggccgtagccgactagtccaattctcatgagtcgataccttcttgaatgggaaacccggtcaactgtgggagctggcttgcctgcgatagcggtgcgtcaggtactacatttgcaactgaaagaccgctatcgcaggcaagccagctcccacatttttcaatcggatttcttcagtggtttagccgtagaagtgcggccgatccggcaagctcaccttcacaatctgctcgctgttctgcgcttcaatgcacgcatccgccgccaccgccgctgcaaacccgtcccacgccgacggcccgccgacttggccggcgcgcacgctgtcgatgaacgcctgcaactccacgtcataagcgccgataaagcggtctttccagtccatcagaatcgcattcgacagcttcgcaccactgcgcaattgcacttgcgacggctccggcagcttggcgatgccggtctcccccaccacttcgcactgaatgtcgtagccgtactggcagttcacaaacacttccacatcaatacgcgtgcctttggcggtttccagcagcacgatctgcgggtcgcgcaggtgggccagggctttgctcgtcttgcgcgggaacaccacttgcaccgacacgtagtcgtcgttgagcagccagcgcaacacgtccagttcgtggatcagcgtgtcggtgatcgccatgtcggtcttgtagttctcgcccactgtcgggttgcggtgtgcgcagtgcagcatcaagggttcgccgatctggccgctatcgatcaccgccttgagggcacgatagccttcatcgtacgggcgcatgaaaccgacttgcaccaggcgcttgccgtaggcaatttcggcatcgacaattttgcgacagccttcagccgtgaccgccaggggtttttcgcagaacaccggtttgccggcggcaatggcggcgagcacgaattcttcatggctcgggccccaggaggtcacgaggaccgcctcaacctgcggcgaggcgatcagcgcgcgcccgtccgggtacacctcggcgtccagcttcaaatccgccaccaccttggcagcttgctctaggttgatgtcggtcaccgccaccacctggctgttgagcagggtctggctgcaacgacgaatatggtcccggccgatagcacccgtaccaatgacacctagcttcaaagacatacaaaactcctcttgttattagtactgccgggccttggccagctgttcattgagttttttcgcggcggcgttcgtgcgctcgctggtggacacctgcgccacgcccacgcgccaccacgacaggtagccatggaccatggtcttgggcagcaccttgatgtcgatcagcgtcgagacgctttgcgtgcgcgcatccgccagcgcggcttccagttgttccacggtgctgaccttataggtcttgcagccataggccgccgcactcatggcgaaatctaccggcaccaggccgccgtcgagcttgccgctctcggggttgcggtagcggaattcggtgccgaagctgtccatgccgttaccgatctgcaggttgttgatgcagccgaaggccatgttgtcgagcaacaccacattgatcttgcgccgctcctgaatcgaagtggccaactccgaatgcaacatcatgtaggagccatcgccgaccagcgcgtacacctctttggtcggctcggcgagtttgacgccgagggcggcgttgatctcataacccatgcatgagtagccgtattcgacgtgataggtattcacgcccttgctgcgccaggcgcgctgcaaatcaccgggcaggctgccggcggcggcgacgatgattgcgtcgtcggccagggtttggttgagcacgccgagtacacggctttgggtcaggcacgaaccggtcaactcgatgaattcgcgcagcaccgcgcggtcgagaaggtcatcgacttcaggcacaaagccgtcgcctgaatattccacctgatgcacccggtccacttcagcatccagttgcgccttggcctccacgacctggtcaccccagccggaacggtaatcccccagcgcgtcggccagcgcctcaagggccacttgtgcgtcggccagcacttgcacgccgtcgagcttcaaggcatcgcaggggctgatattcaggttgagaaacttcacgtccgggtggttgaacagcgacttggacgaggtcgtgaagtcggtgtagcgcgtgccgatgccaatgatcaggtcggcctgcggcgccagcaggttggccgccaggcagccggtttcgccaataccgccaacgttcagcgggtggctggagaccaccgcactcttgcccgcctgggtttctgcaaagggaatgtcaaaacgctcggcaaacgcctgcagcgccgcattcgcaccggagtacttcaccccgccaccgcagatgatcagcggtttgcgcttgccccggaatgcggccaacgcatcgccgatcatcgccgcagtcgccgggcggcggtcgatgcggtgcacgcgtttttgcaggaaataatccgggtagtcccaggcctcggcctggacatcttgcggcaacgccaaggtcaccgcgccggtctcggcggggtcggtcaacacgcgcatggcgtggatcgcggcgctcatcagctgctcgggacggttgatgcggtcccagtatttgcttacggcgcggaaggcgtcgttggtgctgatgctcaagtcgtggaattgctcgatctgttgcagcaccgggtcgggctggcggctggcgtagacatcgccgggcaacagcagcagcgggatacggttggccgtggcggttgcagcggcggtcagcatattcgccgcgccggggcctaccgacgcggtgcacgcgtagatcttgcggcgcaggtgctgcttggcaaaaccgatggccgcgtgggccatgccttgttcgttgcggccctgatgcaccaccaggtcgccgctgtcctgttccaacgcctggcccaggcccaacacattgccgtggccaaaaatagtgaacactccggcgacaaacttgctctgcacgccatcgacttcgatgtattggttatccagaaacttcaccagggcctgggccatggtcaatcttgttgtggtcatgttcgcaccttgtatgaacagtgaaccctgtgggagctggcttgcctgcttccacaggttgatctgtgtcaggttcgggagttctgcaggtgggcgatgcttgcccccaatgcctgctggatatccgtcaaccgatgcacgctttcagcaaacggctcgaacgacaggtaaccgctgtacccggtactgagcaatgtgtcgatctgcgccgcattgccaagaatgtcaccctcacccaccagcacgcggtggccgtcgcggatcgagttgagcggcgcctcggcatcgtccacgccggagatatgcaccagcccggtcaactgcgggaagaacgcctgctcgccggccaggtgatggtgaaaggtgtcgtgcaccaggcggaacacatccagcccgccgatggcctggatcgcatccaccgccacgcgtttgcggcgcagggcgcattcttcaaagcccaggggctcaataaagccgagaatcccgtattcacgcaggatcggcgccagctcgctcaacgcggtgcgcaggccggctgcgcgctgggcttcattgcgcgtatctccatgctcgttgagcgggcacatcaccaaaccccgggcgccgcattcacgggcataagtggcgagttcaatcgcctgggcacggcgttcgtcgttccacacatcgaacgggtacagcgcgttgatcgacaacaccgtaatgccctgcaccgcgcacaactcgcgcacgcggctggcgggggtgccgaactcgatttgtttgcccgcaaggtcattgcgcagctcaatggcatcgcacttgagcgctaccgccagcccaatgaaatccggcagggacaagttcggtgcaaccatacggttaagggcaaaacgcagcggcgacttcattcttgttgttctccgtccaacaccgtttagaggtccagcagccagctgtgctgcgggtcgttatggaaatgccacgcgcgcttggggccggccatcacgttcaggtaataggattcgtaaccgtacggcacgctgaccgggtgataccccttgggcaccaccaccaaatcgctgttttccacggccatggcctggtcgatgctgcggtcgtcggtgtagacgcgctggaacacaaagccctggggcgggttgatctggtggtaataggtttcttcgagaaagctctggtgcggaagatcgtcggtgtcgtgcttgtgcggcgggtagctcgacgaatgcccggacggggtgcgcacttccaccaccagcagcgaatgggccggctcgctgtcgggcaggatgtcgcacacgtaacgggtgttggcccctttgccgcgcacgctgcgtttgcaattttccgggcggatcaagcgcggttcgtaacctgatgcaccgggcgctgcgcagacggcaatctgcacgtcgctcaaggcggtgacttgcgcgtcggtgcccggcggcaggtaggcggcgaagggggatttttcttcaaaaaccgactggcgatcccccaggttttgccagttgaagccctcgccttcgatatccacccggccactgagcagcaccaggcacagctctttattaccggcgctgaccggaagggtttcgccgaggctcaggcgataggcagaaaaacccacgtactccaggcggccgtcttcgagggcgaccatggtctgcccgcgcttgctgcttttgaccaacaggctcatcacttagtcctctcgttgagcagcgcgcgcagcgtgtcgtagccctttttcgcgtagacatagctgggcgccactgccgggtcctgctcggcctcgaccaccagccagccttcgtatttcgcggccagcaacacatcgagcaattcggcaaaatcgatatcgccatcgccgggcacagtgaaggtgccgttgacgatgcaatcgggaaagctccacatctggttgcgcgccagttgcaccacgggtttgcgcacgtccttgaagtgcacgtggcagatacggtcgatgtgcttgcgcagcacgtcgatgggctcaccgccacccatgtagcagtggcccgaatcaaacagcaggccgacttcagggccggtgcggctcatcagttggtcgatgtcttgcggggactccacgtacgcgcccatgtggtggtggtacgccaggcgcacgccctgggacagggtgaaacgcgccagttccgtaagcttgtcggcgtagtcctgccaagcctgctcactgtggaaacgcgggcgttcgatcaggcggattttggaaccctggatcgaatcggcgacttcgccgtacaccagcactgaggcgccgttgtgtttgagcagttcgacatggccggcgatggcttcgatttcttccgccaccgaacggcgcgccaggcggctggagtaccagccggaaaccagcgccaggtcataagggcgcagtacatcgccgacgcctttggcgtccttgggaaatttgccgttgagttcaaacccttcgtagccgatttccttgccttcgctcaaggccgtactcagcggcgtttcaccgcccagggccggcaggtcgtcgttgctccaggagatcgggttgatgccaattcggattgcgggcatggctgcacctttttgttgttttcaaagttgcatgagatctgctttatgtgggagctggcttgcctgcgatggcatcacctcggttcggcagttgaaccgagtcgcctgcatcgcgggcaagcccgactcccacaaaaaaactgctcccacattgcatttcaactttttaagcgcgggcgctgcgccaggcattgatcaactgttcaaaagtggcctgcacctgctgaatcagcgtctcgtcatcaatctcccccgccatccacgcgcggctcggttcctggaagatcgtgcggcccacggcaaaacctcggcaggtggtgctttggccggcttgacggaagccatcggcgagaaactcggccgacgcattcaagcccagcagcaccacaccccggcagtacggatcgcgttcctggatcagctcgtcgagttttttccagtcctcggccgattgcgcctcgatcttccaccacgccgggtagatgcccaggttgtacaggcgcttgaggctgcggtagagcacatccggataagtagacgggtgctccttgggcgggatgacttccagcagcagttcatggccgctgacaatcgacgcctcgtacaccgccttcagttgcgcttcctgctccaggcgcagcatcggttcgtcgtccgggtgaaattgcaccaggcacttgatgatttgctcctgtggccaggcgatcaggttgctgcccaccgagcggccgtgttcaaacgccaggggccgcgagttctgcacttccacaggccgggcgatccaccagccacgaccgctggcggcgttgagcgcgtcctggccgaaacgctggtcggcgagcaggcccacatcggcttcgacgccctcctcggcgagttttttctccacgcgttcgatggcctggataaacaactgcttgatgtcgctgatgcgcgccgggtcctggccgcccttttgtgccaggtccaccagttgccaacggtggtcgaaggcaaatacaaacagttgcttccaggttttgcgcggcacggtcacgcggtgcaggcgttgcagggttacgtcctgatccggacgggtgatcggcacggggctgctgaacaggtaatccagttcagccggcgtcggcatggccggggcgcaggcgtggcgcgaaacgactaaaccgccgcaggcatttgccaactggctgcaacgttcgtcgttggcatcattaagccagccgctgaggaagcccgacataaacgcatcgccagcgcccagcacgttgagcacttcaacccgcacacccgggtagatcgcgccgtcttccaggcgcgccgggatcgccccgtgaatcaccgtgcagccctgcgggccaagcttgacgaccaaggtggccggggtcagttcgcgcactttacgcagcgcggcaagcaggtcttcactgccacctgcgatcaaaaactcttcttcggtgcccacgatcaggtcaaagcgcggcaggattttctgcacatgcccgctgacagtctggtcggcgacaaaccgcgtttcgccatcagccttgcccgccaggccccacagcacggggcggtaatcaatatccagcacgcgtttgacgttgtgtttggcggcgtagtccagcgcctgaatgctcgccttgtacacgccgtcggtagagaaatgcgtgccggtgatcagcagcgccttactggaggcaataaaagcttcgctgatgtcttcggcacgcagggccatgtcggcgcaattttcgcggtagaacaccagcgggaaggtttcgcggtctttaaggccaagcagcaccagcgcggtgaggcgttccgggtccaccttgatgccgctgacgtcgcagccttcgcgggccagggattcgagcaggaaacggcccatatggtcgtcgcccacccggctcaacatcgccgacttgagcccaagccgcgcggtaccgaaagcgatattggcggaggacccgccgaggtacttggcaaagctggacacgtcctcaagccgcgcaccgacttgctgtgcatagaggtcgacgcccaggcgcccgaggcaaatcagatccaattgacgcccactggcaaaacgagtctggcccatgctggctcctgttatttttatcagcctgcgttgtgccgccgtggcgacggcaaacgctcttggtgagagcagactagaacgttcagcggcaccaatcaatatttattccataattatttttagtggaatattttttccaataagccgatacaaaggctctgcctccaccgtgcatcgtttcagcaggccacgtgcgccgtgatgccggggtatttttttgcgcctaccctgtagacttgcgccacccaccagcgcatcagaagaacacgccagaaggattgcccatgcccgagaccccttcacaagacgctctcgccagccccccgctcaacgccgagcgcctgttgcagctgatcaccgacgaatacgaaagcctgccgcgccagctcaaacgcatcgccagctacatgagccagcagagcgaccggatcatggtcgaccgcatcagcgatatcgcccgtgaatgcgaagtgcacccttcggccatcgtgcggttttcccagcgtttcggcttcagtggtttcagtgagatgcaggcgctgtttcgcgaggcctacacccacaagaccacgccggtgcagaactaccagcagcgcatccgcagcatgatcgccaacaagtcgcagaaagccagcggcggcgacctggcgcgcgagtgcgtaaatgccaccctctccggcatcgagcgcctgggcctggaactggacgacgtggcgtttgaaaaggccgtggacctggtggtcaatgccgacaatatctacgtggtcggcgtacgccgctccttcgccgtggccgattacctggtctacaacctgcaacacaccaacaagcgcatccacctgatctcgggtctgggcggcagctaccgcgagcagatgcgcagcgtgcgcgccaatgacctggtgattgcgatcagctttacgccctatggcaaagagacccagcactgcctgcgtatcgcccagcatcatcaggccaagacattgatcatcaccgacagcaacctgtcgcccctggccaagcgggcgaacgcggtgttgttggtcaatgaagggtcgtcgtttgcgtttcgctcgttgagcgccacgttgtgtctgtgccaggcgttgtttatcgcggtggcgtatcgcttggagttgaaggtggatgagattcacgagcaggtcgggtttgatgactgacctgctggcgcccggctccccctgtggagccgggcttgtgtgggagccgggcttgcccgcgatagcatcgccgcagagcaactgatacaccgaggtgcctgcatcgcaggcaagccagctcccacacaaacccggttcccacattttttgctcagtgcccggtcttttcgcggcgcatcaagcggtacgccgccggaatgacgaacagtgacagcaacggcgccgtcagcatgccgccaatcatcggcgcggcaatgcggctcatgacttcactgcccgtgccaccacccagcaagatcggcaacaaaccggcaatgatcaccgccaccgtcatcgccttgggccgcacccgcagcaccgcgccttcggtaatcgcggcgagcaaatcaccgtccttgcgctgcgcccaggcgtttttcaggtagagcagcatgatcacgccaaactccgccgacaccccggccagcgcgataaacccgacgcccgtggctaccgacaggttaaagcccagccaatagagcaaccacacgccaccggtcagcgcgaagggcaaggtcgccaggatcagcagcgcctcatccacccggcgaaaggtcagatacagcagcacaaagatgatcagcaaggtggcgggcaccaccagtttcaagcgctcgttggcccgttccagaaactcgaactgccccgaatagctgaggctcatgcccggctgcaactgcacctgctggttgatcgcctcacgcaagtccttcaccaccgacgccaggtcacggtcgcgcacgtcgatatacacccagcccgaaggccgcgcattttcacttttgagcatcggcgggccgtcactgaccttcaaattcgccaccgtgccgagggtgatctggctgccctcgggcgtatagatcggcaggttgcgcagcgcgtccaccgagtcgcgccacgccttggggtaacgcaggctgatcgggaaacgcgccagcccttccacggtttcgccgatggtttctccaccaatcgcgcccgacacgatcgactgcacagcggcaatgttcagcccgtattgcgcggcggccgcgcggttgatgtccacgtcgatatagcgcccgccggtcaggcgctcggccagtgccgaactcacgccggggaccgtcttggcggctttctccaccgcttgggtcacggcatcgatctgcatcaggccggtgccggcgaccttcacgccaatcgggcttttgaccccggtggcaagcatgtcgatgcggttgcggatcggcggaatccagatattggtcaggcccggcacctgcaccacgcggtcgagttctttcaccagtttttcgggggtcatgccggggcgccattgatcccgtggcttgaactcgatagtggtttcgaacatttccagcggcgccgggtcagtcgcagtttcagcgcgaccggccttgccgaacacatgggcgacttccggcacggtcttaatcaaccggtcggtacgttgcaacagctcgcctgcggtttgcgtcgacaagcccggcaatgccgacggcatgtacaacaaatccccctcatccagcggcggcaggaattccccgcccagcttcgtcacgggccacacggcgctggcgaccatcagcagcgccaccagcaaggtcatgcgcggccagcgcagcaccgcatccagcgccggctggtacaccttgatcaggccgcgattgagcgggttacgttgctcatcgggaatgcgcccgcgaatccagtagcccatcaacaccggaatcagcgtcaccgacaaccctgccgccgccgccatggcgtaagtcttggtgtaggccaatgggccgaacaggcgcccttcctgggcctgcaaggtaaacaccgggataaacgacaaggtgatgatcagcaggcagaaaaacagcgcaggcccgacttcaactgccgcatcggtcatgaccttccagtgatcatcgcctttcaactcccggccaggattggcgtgatgccaggcctcgattttcttgtgggcgttctcaatcatcaccacagctgcatccaccatcgcgccgatggcaatcgcaatgccgcccagggacatgatgttggcgttgatcccctgaaaacgcatcacgataaacgcgatcaacacgccgaccggcaacgagataatcgccaccagcgatgatcgcaaatgccacaggaaaatcccgcacaccagcgctaccaccaaaaactcttccaacaacttgtggctgaggttgtccacggcgcggtcgatcagtttgctgcggtcataggtggtgacgatctccacgccggggggcaggctgcttttgagctgttccagccgggttttcacggcggcaatggcctcgcgcgcattcttgccgctgcgcagaatcaccacgccgccgaccgcttcgccttcgccgtccagctcgctgataccgcgccgcaggtccggacccagctgaatctttgccacatcgcccaacaccaccggcacgttattcacgccaaggcgcaagggaataccgcgaaaatcatcgagtgttttcaaataacccgaggcgcgcaccatgtactcggactcgcccatgttcagcactgaaccgccggtttcctggttggccttgccgatggcctcggccacctgcgcctgggtgatgccacggctggccatcgccagcgggtcgagttgcacctggtattgcttgacctggccgccaatggtcgcgacttccgccacgttggggatggtcttgagttcgaacttgaggaaccagtcctgcaaggcgcgcagctgcgccaggtcgtgcttgccgctgcggtccaccagcgcgtactggtagatccagccgacaccggtggcgtccggccccagcgcgggcttggccgacgccggcaaccgcgcctgcaactggctgaggtattccagcacccgcgagcgcgcccagtacaggtcggtgccttcgtcgaacagcacatacacgtagctgtcgccgaagaacgaaaaaccgcgcacggtcttggcgcccggcaccgagagcatggtggtggtcatcgggtaggtgacctggttttccacgatctgcggcgcctggcccgggtacggcgtgcggatgatcacctgcacatccgagaggtcgggcagcgcatccaccggcgtgttctgcaccgcccacacgccccatgcggtgatgaacagcgtggcgagcagcaccagaaaacggttggccaccgaccagcgaatcagcaaggcgatcatggctgagctcccggttgcatgctcatcggtgcttcggcagccgtcacgcccctgaggctggcttcggagtcgagcaggaactggccggacgcgaccacctgctggccttcctgcaagccgctgaggatcaccgtctggtcgctgttttcagcgcccgcttcaacctcgaccggccggaaccgcccgccctcctcggccagcatcaccaacacgcgtttgccggtgcggatcaacgcttcgctgggcacctgcaacaccgcttgcccgctgctttgcgccaggcgcacttgcgcggtcatgcctgggcgcagggcgccgtcggggttgggcagttccacgcgaacctgcacggtgcggctgtccatggccgtggccggcaggatcgcactgacggtgccttgaacggaccgatccggcaaaccggcaaactggctttccacgcgttgccccaccttcaagcccgcgccttgggcctcgggcacggcgacctgcaaccacacctgatccaggccattgatacgcgccagggtttgccccgccgccacggtcatgccttcgcgcacctccagggtttgcagcgcgccgcccaacggcgtggtgacggtcaacaccgactgcacccggccactgcgctccatctgcgcgatcaacccggcgggcatgccgctcaggcgcaaacgctggcgggcggcggcgatcaagccgttgtcagcactgcggcgcaacgcgaggaattcctcctgggccgccgcccactcggggaagaggatgtctgccaacggcgaaccggccaccagcacatcgcccggcgcacgcccataaacccgctcgacaaaccccgccgcccgcgcctgtaccactgccacatcgcggtcgttgaaggccagaatgcccgacaggtccagcgtggaagtcaacacgccgcggctgaccgtcgccaggcgcacgccgatgttctgggtctggcgcgggtcgatctgcacactcggtgtatcggtcgcagcaccttcggcgtaacgcggtaccagttgcatgtccatgaagggcgattttcccggcttgtcgaacttctgctgcgggtacatcgggtcgtaccaatacagcgcgggtttttcccctgtgacggcaacggagggtgccgggcgccactgcgccagcccatagcccgcgcccagcccaagcagcaatacggcggcgatgattcgattattcattggcgggttctccataggcgaaatacagccgggcaccgaccagtgcgcgctgttcaatggcatccatctgtttgaaacgggcgtcgaccagctcgcggcgggcactgaccagattcatcaagtcgcctttgccggatcgataaccggccaggctcaacgccactttctcttcagccagtggcaccaggctgtcctggctgcgttgcacggcacggtccaggcgttggtaatccgcgaggtcgtcgtcaagcatttgggtgtgttcgcgggtagcggcttcgcgttcggcgtccagttggtccagctcggcctgcttggcggcaatgccggggttttgccggcggccggggaagatcggcaagtcgaagctcaattgcagggtgaccatgtcgccgtactcgcggctgcgatggccgtaatcgacctcccagctccagtccgaggttttctgcgccttggcatcctgtaaacgcgcctcggcctcgcgggtgcgtggcacgaaagcttgcagttcgggatgttggtgcaggttatggctcaggccatggctgtcgaaggtccagttgggcaactgcccgctgggggcttcgctggccgccgcgccgatccagcgcttgagggcggcgcgcgcctgggcgcgttgcagggtcagttcgtcctcgcgcccggccagttcggcggcttcctgtttagggatgacggcgtcggaagcctggccacgcccgccggccaactgtgcgcggacgctgtcttgcagcaagcggttctgggtgtagaagtccttgaacaaggcctccttgcgctcgaccacgtaggcgcgaatccacgcctgggcggtggcctggcgtacattaagacgctcgatccgcccttctgccgccgtgcgttcaatggttgcgtcggccagttcgacctgcgccttgcgcttgtcgcggctgggcacttgttgctggatgccgatcatttgctgcgtcatgtcatcgccatacagcgtgccgcgattgggtccgccgatggggaagttctgcaggccgaccagcagtttcgggtcgggcaattcaccggcagggatcgccgcctgcgtcgcggcttgcagcttcgccgcctcggccgtcagggaaggcgcattgttttgcgccaggcgcagggcgtcatccagggtcagcgcattcgccaacgccggccacgccagcacgcccaccaacagggcgcgcaggtagaaggaagtcatgttgaaaattcctgatccgttgcgctgtacgccgcatcacgcggcccacagcaaggccatcccggttaggggatgaagcttgggaggcaacagggttcaggaacgaggtgggcgccagacgccggacggcgtgcggtcggggatgaagtcagtgggcaagcccagcgcgacgggatgagccatgctcagcggggccttgaacaacggcatcgacagttgcaccacgccaccggtcttgcattcctggccggttttgcaggccttgccatggtcgacgccgtcctggcagcagtcaggggacatgtccgtcatcatctgcatgcccgacattttcatcgggcaaggttctgtacttgaggccacacccgccatcccagtgaggggaagcgtgaggctcagtaacatcaccaggattaaacgcagaagtcggctcatggggcgcgagtctagccaagcccgagttaagccgctattaacaattgcgtgagaattcggccgtgataacggatttgcgcgagggtcagcgcggtgtaaccgatgatcaccgccggcggcaaatgggcctcgacacagaacttgcccaacggctgcaagaccagcccgacggcagcggcgcggcggcagaaatcctgctcttgcacgcccgctggcaaccacagcacacaatgcagcccggcctgctggccactgacgcggctgccctctggaaggcaggcgagcaaggcatcgcgccgcgcctggtaggcgtggcgcgaggcgcgcagatggcgcacaaacgccccgctgccgagaaactccaccaagcccagttgatcggtggcgcccactgaatgcccggtgagttgcagggtgcgcaacaacgcttggcgcagcgcgccgggcaccaccatgaagcccacgcgcaagccggggtagaggttcttgttgaaactgccgcagtagatcacgcggtcggccgaatccagggatttaagggccgccaatggggcgctgttgtagttgtactcgctgtcgtagtcatcttcgatcacccaggcatcggcgcgggcagcccagtccagcaaggcaaggcgccgggacaccgagagtgtcatgcccagcggcgcctggtgtgcgggcgtgacgtaggccagccgcgcacggtcgggaagctgtgcggtatcgagcccctcggcggtgactggaattgcctgtacatgggcaccggccatggcgaaaagccgtctcgccggtttatagccgggatcttcaacgcaggcggtgtcgccgggtttgagcagcgtgcgcgcgatcaaatccagggcgtggcgaataccggtggtgacgatcacttcatccgcttcgcagtgcatgccacggtaactgcgcaggtacccggcgatctgttcgcgcaaggcgggcaagccggccgggtgggcggcttccaacacgcccgggccggcagtgtgcaggccacgggcgatacagcgcgcccaggctttcaggtccagcaggctcgcatccgggcgccgcgcgacgaagggcacgttgctttgcacgccagcatggggcgggtcctctaccccttcacggcgcagcgtttccctcggcgccggggcggcgatgaactgctcggggatcaccgcacacacccgcgtaccggaacccgccacccgctgcacatagccttcgctgtgcaaacgttcgaaggcggcctccagcgtgccgcgggacaccagccagcgctcggccaggctacgcgtggacggcaagcgactgcccgcaggcaactggcggttcaagatcgcaccgcgcaatgcttcgtaggcgccctgctgcttgccggcgtccagcgtatcggggcgcggcagatccagggcggtggcagcttttcctcggctcatagtggtccagtcatccttggcgtaagtggctcacagaattaaaccacaacgccggtaaagtgcggctctactctttgcgaagaagctgctcatgactcaacgcaccctctccaccgggttttggctggccctgctggccgtcttgattgccttgccgcgcctgacgctggacctgcacctgcccgccctgcccgccatggccgatgacttccacagccgtgacagccaactgcaactgatccttacgctctacacgctgggctcggcgatttccctgctggtcagcggcccgttgaccgaccgcttcggccgccgccccgtgctgctcgccgggttgtgcctgtatgtgctggcgaccgtcacctgtgcggtggccgacagcctagacgtgctgatcgtcgcccgcctgtttcaggccctcggcggttgctgcaccacggtgatcggccgcgtgatcgtgcgcgactactttgaccgccatgaacaggcacgcctgctcggcttgatctccatggccatggccatctcgcccatggctgcgccggtgctcggcagcctgatgctgccgttcatccactggcgcggtttgtttgtgttgctcgcagtgatcggcgcggtgctgtacctggtggtctatcgccgcctgccggaaacccgcccggcagaagtcgccgccgccccgccgagcggcctgctgcgcatctatagccagttgctgcgcgaccggtatttcctgcgctattccctggcgatcggctgtgtgtacagcacgtacttcccgtttatcagtgagtcgtcggcgctgttgcagcggggctttcacttgtcggcgaccgcctacgcactggtgttcgccgcaaccatcagcggctacatgctcggcgccaatctgtttcggcgcctggtgctgcggtttgaagccgatcggctgatcaatgccggcatcgccctgaacgtgctgggcacgctaacgctgacccttgcgaccctggcgtggccgcaggactggctggcgattgtgctgccgatggtggtgatcatggtatcggtggggatggtgattccggcgtgccaactgtcggtgttgcagccgtacggggcaattgcggggacggcgtcggggttgttcttttttattcagatgttcctgacggcgctgagcagctgggcgacggggttgttgtcggatgggacgtctgagccgctggtggtcatgacggcggtggcaagcctattgctggtgacaagctggctgacactccataaaaccaaatgtgggagcggcggttcgacgattcgacttgcccgcgatagcgtcgtgtcagtcaactgatcaataactgacagaccgccatcgcgggcaagcccgctcccacagtgggccaagcgagcccttggcttagtgcatgaagatcgcaatcaggatgatgaccgggattggcacaccgaggaaccacagaagtaatgagcgcatgatgttctcccttaattaacggacaaagtgttcagtttcgacatacaccacagcatcccgacggcgaccgccaaaggtggcggcaaagctggcgaagaatgcaccgatcaacagtgaaacgaaggtccacagcgacgcataggcagccaccttggcagcggtgtcagccgcttgcttggctttgagcttggcgtcttcgagggccttacgggcatcgccatacactttgtcgatacgcgcttcggcgtcggcctggctgaggttggtgcgctggctgatcaactgggccaggtaggtccggtcttcaggcgcgagctggccatcgttgctcagggtgcgggtgaggatgcgggcgacgacaccgtgcaccgcgtcatcactgaccgcagccgggcgatcatcacgaaacaggctgtcgacgtagtagtcgaagtcgccactgttggcgcctttggctgcactcccggccgcttggctcaggccactggcggcgcccgatgcaacgctggcaccggcttttacgccgccactcaccacgctgctcaccgaaccgaccaccaatacggcggtgatcaacgtggcgacggcccaggcgagaaaaccatgggcggtgtcgcgaaagtacacctcatcgccatgcatgttggcccacttcacccgcagacgcccggcgatgtaaccgcccaggccggatgcgacgatctgggtaaacgccagccagacaatcgtggaaatgccaaggcccttggcgctgataccgctgtcggcccacggcgataccgcagaaaagcccaggccgaagcccagtaacaccagaatcagtgacagtgcagccgccgcagcggccccggcaaaaatcgccccccaggaaaccccggagagcgtgctcgacgcttgcagtgtggatgaggatgtggtcattgttgttgtgctcccggcaggaaagaaaatgttacaagtctcaaaagggacagtgcaggcagcatgccagtcgctcgaaaaataaatttccagtcatttcagtgagttagataaattgaacttacgcaaaccatgcaagttgcaagaaatgacttccagcggcgggcgtattgcactctttccagcaagcttctttgtcacaaaaaaatgcatgaacacagcgtgtgttcaggatgtcgggggcatgatcaggtgaggtcacgggcagccttatgcttgaacgggcctcccgtgattttgtgtcggttttgccaacatgaagtttaatttaggaagcaatctggcatttcttggcaaaatgcccccacttctagtgtgaatcgctcaccaggtaatcctatgacccgtattttgaccatcgaggatgacgccgtaacggcccgcgagatcgtcgccgagctgagtagccatggactggatgtagattgggtggacaacggccgcgaaggcctggtccgtgctgtgagtggtgattacgatctgatcaccctcgaccgcatgttgccggaactggatggcctggccatcgtcacgaccctgcgcaccattggggtgtcgacgccgatcctgatgatcagcgccctctccgatgtcgacgaacgggtacgcggcttgcgcgccggcggtgatgattacctgaccaagcctttcgcctccgacgaaatggccgcccgcgtcgaagtgctgctgcgccgcaagagcacggtcaaagagtttgaaaccgccctgcgcgtggcagaccttgaattgaacctgatcagccgcgaagccagccgcgccgaacagccgctgagcctgctgccgaccgaatacaaattgctcgagttcctgatgcgcaacaccgggcagatcctctcgcggatgatgatcttcgaggaagtctggggctatcacttcgacccgggcaccaacctgatcgacgtgcacatcggccgcctgcgcaagaaaatcgacccaccgggcctgacgccgctgattcgcacggtacgaggttccggctatgtcattgctgaacccctctaagggttggcgctcttccagcagccgcttgctggcgctgtacagttcgctgttcgtggcctggagttgcatcctcatgggggtgctgtatttcgaggtatcagggtacctgggcgacttgtcgcgccattccctgatgcaacgccagcatctgttccaacgctttgacggcgaagaactggtggaagccttgaccaccagcatgaccttcgacatgaagggcgtggacgcctacggtttgttcgacgagcaatttcgccccttgagcgggccgatccgcgccgtgccgccggacctgccgctggacggcaagattcacgcgctggtcaactgcgtcgaatccgacgaccccaaactgcccaaagacagctgcgacgccgtggccacccacaccgaagacggccgctggctggtccttgtgcgcgccaacggttcgctgttcggcgtgacccggatcatctggcatgcgctgttgtgggcgctgtccctgacgatcatcccgggtgctgccggctggcatctgttgcgccgccgccccttgcggcggatccgcggcatccaggccagcgccgaggccatcgtcgccggcgacctgacgcaccgcctgccgttgtccaaccggcgtgacgagctggacatgctggcggccatcgtcaacgccatgctcgaccgtatcgagaagctgatgaacgaggtcaagggcgtatgcgacaacatcgcccacgacctgcgcaccccgctgacgcgtctgcgcgcgcagttgtatcgcatcaagcaggaggccgaggcggagtcgggctacgcggtgaaactggatgacgcgattgccgaaaccgacaccctgatggcgcgttttcgcgggttgttgcgtatctccgagctggaagaccaccagcgtcgctcaggctttttggtgatggacccgctgccgctgttgcgcgaactgcacgacttctacctgcccctggccgaggaaggcgagctgcaattgcggctcgaaaccccggaatccctgccgtggatcaccggcgatcgcgcactgctgttcgaagccctggccaacctgttgagcaactcgatcaagttctcccctccgggcggcgaagtgattctgcgcggggtcaatgatgcgggcagcacgcgccttgaagtgcacgactccgggccaggcataccggtggcggaacgtgacgcggtgttccagcgtttctatcgcgtggacgaaagcgaccagcaaggcgggttcgggttgggtttgtcgattgtggcagcgatcatcaacttgcatgggttcaagctggaagtgggttccagcctgtgtggcggcgcgtgcctggtgctggaatgccggcagcagttgatgcctgaataacccaaacaccccataaccctgtgggagattctatggttggggagcaaccctcaaccaaccttcggttggtattcgttttgccctttcagcaaggcaaataccacccgagcaagcttgcgagccaacattaccagtacctgagtggtgctatatccccgtgcccgctgcgtctggtaaaactctgtccatgctgcagtccggctagccgccattgctgcgttatgcagaagacgccgcgcttctgagtcgccgcgcttgcttaaactgcgccgattatctttctgcccggacttggagacgcgcaagtccatacccaagaaagcgataaatgcgtccgcatttctaaagtcacctcgctggaagctggtaatcaagcgggccccggtcaaaaagccgataccttcaacgctcatgcaacgtttgagttggcccagtaacccagcctctttcagtcgatcgctgatcattttttcgatcagtccttcaagtctttgcatcgacttcatttgctcggcaaaagaggccttcaacagcggttcattcgcccagctttgcgtcaggctgacgcgagcttgaaccagggcggcacggcggcggaaaaggctcaacagttggcgataaagaggggacggcggtgtccaggggcgaagctcgtcggcttcttttcgcaaataccgtgctagtaattgggcatccagggcatcagttttggcacgaaccttcacacttttgcggtaatgactgagttcataaccaccgaccatgtagataacgcagccagcttcataggccagatcagcaaactccaagtggtaggtgttggtggcctcaatggcgatagcaacgctgcctggcaaagcccccagccacttttttatagcggctttggtattcgggattgcttccaaaaaatcgagatcggcgtgataaatcaccaattcattttttgcgacatcaataccaacaatcggcttggagacgggaactggcattgccatagtgacttcctccgggctaaggttttgagcacttgaagggctcacccagaggcgcaggcttgttcctatcgtcggtcatagccagatgcattctttatcggcgcttgggtgaaaggaggaggggcgaaatctcccacggtctgtactgcgccaacagtcagaatctggctttgtccctcctcctcccttcaagtcctagcatacaagctggcttgcctgcgatagcggtagcccaggcaataaacagtttgcctgatacaccgccatcgcaggcaagccagctcccacatttgatttgcagtggctgttagaaattggcgcgcagcgcctccagcccaccgctgtaaacgccgctgaacaactcttccaccgccgcgtccgtagtgcccgccgccggcgtaaacacaccggaccaggtcactttggccgacgactcgctcaaggcttcgacctgcaacgtcgccaggtaagcactcaccggaaacggtgattgttcgatggtgtaactgtaggtgcgggccacgttgtcgaaggtctgcaaacgctcgacgatcacgccgccctccgccgtttccagatgacgcacacgcccgccgtcgctggccgcgctcttgacgataaacggcagccagtccggcagcgtgttaaagccgccgatcaattgccacacctgatccgccggcaccggaatttcgattactgaagaggctgttgccacactaaatactcctgaagatgaaaaacaattcagattgccatgctgtccacaacaccaccgtcgacccgcaacgcggcgccggtggtggcagacgacagcggtgaagcaatgtacgccaccaggttggcgacttcatccacattggccgcacgctggatgatcgacgtaggccgtgcattgcgcacaaacacatcggcctcgtcccgcgcgctgcgcccggatttggccgtggcgtcggccagcatctgctcaaggccgtcggtaaaggtcggccccggcagcacggcattcaccgtcacgccggtccccgccaagcgcttggccaggccgtgggacaccgccaggttggcacttttggtcacgccgtaattgatcatgtccgccggcgttgccacaccggattccgatgacaggaaaatcacccgcccccagccctgctcgaccatgcccggcacatagtgccgcgacaggcgtacgccggagatcacattgacctcgtagaagcgcgtccactcactgtctggcgcgtcgaagaaatccacatcattaaagatgcccaggttgttgaccaggatgtcggcacgcggttcggcggcgaagagtttctcggcgccttctgccgtgccgaggtcggctaccagcccgcgcaggtcagcgccgggcactgcctggcgaatgctcgccagggcgtcgtcgaccttgcccgcttcacgcccgatcaccaccacggtggcgccggattgcgccagggccaggctgatgcccaggccgatcccggcggtgctgccgctgacgatagctactttgccgcttacatcgattttcatgggttgaactcctgaagttaaagcggcaggggcgcgcggtccgaaatcaatcgggcatcgcgcagggcctgccagaaggctgccggaatcttctctgacaacgccgcgacgtcttcggcaatgcgccccggacgactggcacccggaatcaccgccgccacggccggatgggccagggagaattgcagggcagcggctttcacgctgacgccgaatgcctgggcaatcgccttgatctgctcgaccttggtgatgatcgccgggctggctttctggtattcgaagtgcgcgccaccggccaggatgcccgagctgtaagggccgccgaccacgatctcaaccttctgcgcggcagctgcgtccatcaagcgttgcagggcgcggtcgtggtccagcagcgtgtagcggcccgcgagcagaaagccgtccggctgggcttcgctcaggtccagggtcagttcgcacggctcaacgcggttcacgcccaggccccaagccttgatcacaccctcttcgcgcaggcgggtcagcactttgaacgcgccagtacgggcctggttgaagtagtccagccactggtcgccgtagaaatcctgggcgatgtcgtgaatccacacgatgtccaggcggtcggtttgcaggcgctccaggctgtcttcgatggagcgcagggtggcgtcggcgctgtagtcgttaaccatcttgttcgggcggccattttcaaacacgccgcttttttcgccgaggtcgcgggcgctttcttcgacttcatcgaggatcacccggccgactttggtgctgagcacgaagtcatcgcgattgtacttcgacagggcctggcccagacgcatctcggaaagccccgagccgtagaacggcgcggtatcgaagtaacgcacgccggcattccaggctgcctcaacggtggcctgggcttcttcttcaggaatggcgcggaacatgttgcccagtggtgcggtgccgaagccgagctggcccgggagtttgtctttcaagctcatggtggatcctcaaatgcgtgaagggtcgctgtgaccgttgagcagatcctagattgcatagatcggaccgtccaagacatactgcgaccaacttgagtcccacgaggtctgacatgatcgacctgcgccaattgcgctacttcgaagtcgtcgccgaagaagaacacgtcggccgcgccgccgagcgcctgcacatctcccaatcgcccctgagccggcagatcgcccagttggaagaacggctgggcctgaccctgttcgaacgcagccagcaacgtatccgcctgacgcgtgatggccagacctttctcgctgaaacaaaggcgctgctgacccatgccaaccggctggaatccttgggcaaacgcctgggccggggtgaagaaggcgggttgtgcatcggctatatcgaaaacgccatgcacgccggcgtgctgcccaacgccctgcgcgtgctgcgcgatgaccgccccaccgtgcatatcaagctgtacaacctgtcgtccctcgaccagcttgaagggttgcgccaacgcagcctggacattgcgctggtcgacgaaccacccgccgctgatgacccggacttgaccgccttgcaggtgctggacgatccgatgctgctggccctgcccgaacatcatccactggcgcgcctgcgcgagttgctgccagaacatctggctgagcaggagtggatcggtgtgcaacgcaaaacgggggccagcccggccgatgactttgtcgccgcctgcattcgcgcgggttttacgccgcaaattcccatggaagccagcgaaccgtttaccgcactggggctggttgcatcggggctgggtgtggcgatggtgcaaaaaggcctgagccgcaatgcgccacccggcgtggtgttgcgtgaattgccttggctgacctacaccaccccgctgtgggcggcgtggcaccggatcaacctgcggcccttggtggaaacttttcgcaaggtgctcaccgaacccagtgcctgacgccattcaaaactgtgggagcgggcttgctcgcgaatgcggtgaatcagtcagtgcatgtgtcactgaaagaccgcattcgcgagcaagcccgctcccacatttggatagcggtgtcggttagatcacctcccgcagccgataccacaacattcccaacgccaacagcggcgagcgcaatgccttgccacccggaaaggtcatgtgcggcacctggctgaaaatatccagcccggtgctttggcccgcgtgaatcccttcggccagcaaccttgcgcaccaatgcgtcacgttgagcccatgcccggaatacccttgggcgtagaacacattggggtactgcttcaaccggccaacctgaggaaaacgattggcggtgatgccgatcttgccgccccattggaactcgatcgcggcgtcggccaattgcgggaagactttgagcattttcggttgcatataggcggcaatatccaccggatcacgccccgaataatggcaggcgccgccgaacagcaaacggcggtctgcagacagcctgtagtaatccagcccgaccttctggtcacacagcgccaggttctgcgggatcaactggctggccagcgcttcaggcaaaggctcggtggcgatgatgtaactgcccgccggcagcaccttgccactcaggcgtggttccagctcttcaaggtgcgcgttgcacgccagcaccaggctggcagcgcgtaccgtgccgccggcacagcgcacttttaccgtctcgccgtgaatcaactccagcacttcggtctgctcgaaaatccgcaccccgagggactcggccacctgcgcctcgcccagcaccaggttcagcgggtgcaggtgcccggagcccatgtccaccaggccaccggcatacgcggtagagccgacgacctgacgcatgtcctgcgggccgaccagacgagtttcatgggcataacccagggcggccagatgctcctgctcgcccttgaacgccgcgaattgcgcaggcgtattggccagctcgcaaaagccccagcgcaaatcacagtcaatgccgtacgcgcgaatccgctcgcccaccaacgccaccgactcgattccggcctgctccaaataacgcacaccctccccgcccacgtatttggcaaagcccgacacgtcatggccgatgccccgaatcaactgcccgccgttgcgcccgctggcgccccagccgatgcaccgggcctccagcaggatcaccgagagcccgcgctgggccagttcgatggcggtattgacgccggtgaacccgccgccgatcacacacacatcggcggtcagatcagtgcccagcgacgggcgctccggcatggcattggcactcgcccgatagtaggaccgggcgtggtcagtcgactgcatcatttgttggtcttcactttgctccaggcgcgggtcatcaggcgcatggtcgccggggtgggcgtggtggaaatgtagagcttgtcgagcacttcctggggcgggtacacctcagggttgttcaccagttccggggccatgaacggtttggcggccgggttggcgttggcgtaacccaccgaggcactgaccttggcgatcacttcagggtcgagcagatagttgataaaggcatgggcctctttcgggttgctggcgtcggcaggaatggccagcaggtcgaaccacaggttggagccttccttgggaatcgagtaagcgatattcacaccgttcttggcttccttggcacggttggcggcctggaacacgtcgccggagtaaccgaaggccacgcagatgtcaccgttggccaggtccgagatgtacttggaggaatggaaataggtgatgtacggccgcagcgtcagcagcttggcttcggcctgtttgtagtcctcggggttctcgctgcgcgggtccttgcccatgtagttgaggatcgccgggaacagctcatcggccgaatcgaggaaggcgacaccgcactcatgcagcttcttgatgttctcgggctcgaacagcacggcccacgagtcgatatggtcgatgcccagcacctgcttgaccttgtcgacgttgtagccgatgccattggtgccccacaggtacggcaccgagtgcgcgttgcccgggtcgtttttctccagcagcttgagcagcttggggtcgaggttcttgaagttgggcagctgcgaacggtccagcttgagaaacgcaccggcctttacctggcgtgccaggaagtggttggacggcaccaccacgtcatagccggtgcgccctgccagcagtttgccctcaagggtttcgttggagtcgaacacgtcatagatcactttgatcccggttttggcctggaaatcggccagggtggtctcgccgatgtagtcggtccagttgtagacgctgaccgtttgcgcggcctggccggtagcgctgaacgccgcgacgagcgccagcgggagaagctttttcacaagacgcatttcgacacccctttattggttttttagacgctcaacagcaggaactcacgctcccaggaactgatcacccgcttgaaattctcatgctcggcgcgtttgaccgcgacatagccgcgcacaaatttgtcgcccaggtaccgcttgaccgtgtcgcaatcttccatccgcgccaacgcgtcttcgagggtgaacggcaggcgcaggttgcggcgctcgtaggcgcggccttccaccggggcgctcggttcgatctgttcgatcatcccaaggtagccacacaacaggctggcggcaatcgccaggtagggattggcgtcggcacccggcaagcggttttccacgcgcatcgcgtcagggcttgaggtgggcacgcgcaggccaacggtgcggttttcttcaccccactccacgttgaccggcgcggaggtgtccggcagaaagcggcggaacgagttcacgttcggcgcaaacatcggcagcagcttggggatgtacttttgcaggccgccgatgtggtgcaaaaacagctggctcattttgccgtcagcgtcgacgaacaccggttttccggtggcaatgtccaccacgctctggtgcaggtgcatggcgctgcccggctcgtcggccaccggtttagccatgaaggtcgcagccacgttgtgcttgagtgcggcttcacgcagggtgcgtttgaacacggtgatctggtcggcgaggtccagggcgtcgccgtggcggaagttgatttccatctgcgccgggccgtcttcgtggatcagcgtgtcgaggtccaggccttgcagttcgcaccaatcgtagacgtcttcaaacagcgggtcgaattcgttggcggcatcgatggaaaacgactggcggccggtttcggcgcgtccggagcggcccaccggggttttcagcggcaggtccgggtcttcgcagcgctgggtcaggtagaactccatttccggcgcgacaatcggctgccagcccttgtcggtgtagagctgcaagactttcttcaagatattgcgtggcgacaactcgatgggattgccctgtttgtcgaaggtgtcgtggatcacgatcgcggtgggctcgatggcccatggcaccacgtaagtggcgttggacaccgggcggcaaatcatgtcgatgtcggccgggtccagcaggtcgtagtagatatcgtcgtcgacaaagtccccagtcaccgtttgcagcagcacactttccggcaggcgcatgcctcgctcatgcaggaacttgttggtgggcgcaatcttgccgcgtgcgatgccagtcaaatcactgatcacgcattcgacttcggtaatcgtgtgttctttcagccaggcggacagctgatcgaagggggcgttcataaggacctcgtcatgggttgggtgcatgcgccggcttgtactcccggggcattgaggtctatcttgggccagccttcacacggcatctatccactttgcacgcttcacaacgcaccaatagagtgcgtacggattacccatgacacaggcaacggctttgcgcgtacaggccttcaccaccggtgatgtggccgctcaatgcagtgcaacacccggttgggtgcagcagtaccagcagatgtctccggggcatttttccgggcagatccgctacctcgacctgcagggtgtcgaggtctacgaagagtgcatgaacacgcgggtggagcagcatttcaatgcgccaaccggctcattggcgttctgctttgacggcagcgataacgcgctctacatgctcaacggcgaaagccgcaacacctggatcaccccggaaaactaccgcgaagtggcggtggtgttcgggccgcaatttgtgcagcgccacggcctggatgtggcgaaactggaaggcctgttcctggcgccgctgacctgccaacagaacgcattgttcacgcgctggctcagcgggaccttgacgcgcttgtccagcgtgatcgacccggtcagccgcgacgccctcacccagcaactgctcgacgactgcctgtttatcctcgacaacgcctgcgtgtgcctggaccgcagctcattgcagcgccgcagcgaagaacggcggctgatggcgcgcatcggcgaatgggccgcggacgcgccggatgaaaccgtcaacctgctggagctggcgcagattgccggcgtgccgttgcgccaactgcagcacggcttcaagacttacaccgggatgagccccgcacaatggctgcggttgcgccggttaaatggtgcgcggcgggagttgttaagtggcgcgggcaccaccgtggccgaggttgcgatgaactggtcgttctggcatttggggcggttttccaacagctatcgggcgttgtttcaggagctacccagcgagaccctgaaacaccacccgaatcaccgctcacacccgtagagcgggctttggattatttcagccgcgctcgtttgggcagctgaaacatggggcggccttgtctcaaggcatcgtaattcaatatgccctgttcaagactttccagcagcaacctgggattgtccacttgtgccaaatcccgattgattccacgcatacggattcgaagtgattcgtccgaatacgcgacccgcttgagcaatagccacagccgttcccgcaagccttcatacccggcctgataatctacggtcgcggacagcttggcaaagcgcgacaaataaccggtgatatgcgcatcggcggcctgctcctgtgctgccaccttttgccatagcgccgttctggcagccgcgtcgggctcagacaaccccctgagccagtcaaccggttggttgagagggggtgcgttggtgctgatccaaagctcgacacctgtttcctgacgaaacgcgagtaaccgttggagggagttcaaatcactcaagggatttccactcagatccaggccccaccttaaatcaaccactcggggaatagtggtgatcaggttatccgctagccccacggactccaacgtgctgcgctcaagcaaggccacaggcatagccgtcaaccctgttcgatcgagcctgatattgcgtaatttgcccagcgtggcaatcgatggcgggactcccaaagggttaccgctcaggtcaagtgactccagtgctgccagctggccgatcaactgattattgcccggcaccatctgcagtgccccgtcggtcaacttcagatgcttcaagcggctcatttttgccacatccgccggaatcgaggtgtcggtcaaaccttgaatctcaagggtttcaagacggggaaagcaacccagatattcatcaagtcgcgatttaggtaaggccatcggttcactcagagcgaccacggaattgaattcaacgtacctgggaacgaaaggagcaccgggcaacctgggacgatccaggcgtagaaacctgtcatccggtggaaagtcagacggaaacttgaaaccaatcatccgaccatcgcgataaacctttagagcgtccgggccacgccacgtgtagagcagacgtagcttctcgatgatgtcttttcgggatatcagctcgctatcgatccacgcctgtttgtgctcctcatcaatcgaggcctcggaatcattcagggttgagtaatagtcgtcctccagaatgtcctccgacgtccagtgctcaaaacaactttccaggtcggcctgggactcattgatgcgctgtaattccgcctgcgcctctccaggccaatcgaaacagcccatgaactcattgacctgctgatccgtgaaaccaggaatatagctatcaaccagcattctgtcggccgacagggctgccgtcggcacgctcccggaaccgccgcgcaaccctccctcttcaggttcaaaaaacggtgtgcgcaattgctggcggcgcagcaccgtttcaaaatcgcgccggcccatgaggttgagccgcagcttgaatttgaagtggtcgagatcgtcggcccgcacgcccatctggcttaattcggtgtccgacaggctgtgtgcaatcgcatcggcaaaatcgtcagtggtgtaaccaggactcggcattgagtccaggcacaggaagcgatctgcatcctgaatgatcgtgcgctgctgcgcgagggacggcgcaccgaccctgtccagcacggctccgatgggcgacccttcgcgcaccgttatcgacagccgagggttccagccgggcatgcgttgggcactgtgaagcagcaacgtgtggctgtcggcgttgcgtaccgtctccagataactcccttcatacgctcgtgccaggcgcaattcgccttcgtaggcctgcacctgagattccatccgttggaacaacgccttgacctgacccagcgtcaaggtgctgtcagggctaatgtgttgatcgaataacatctgatctcgtactgacaatggcagcgacgggtattcatgtgcgaggagttgctggagttcactctgcggttccgtgattttttggtaatagagcgcaaataccgacacacgctggtcatgaacaatcccttgagccttgaggcgcagcaatcgggctctgacgttgatcgcgggatacggtgcctttggctccagcagcccacccagcaagttgcgggtattttgctcgctcagtcggcgtgccacagacctgaaaaacgggttattttttttttgaatcgtcaacacatctgcggcttcttcggcaacgcctgtcgcccagatgacctgatcaccatccatcagcttcaaccccacgccggctggccaatccttatccgtcgccaaccagcgcaacatgtgcatgtcgcccagtgacgactcagcgctgccaagctgcacgatataagcttgcactcgctctgcggttttaaaacgcagcaaagtgtctgccagcaggccctggggccgggcgcctgtggtgagttgaaggcgcagttggtcatctgtcacgccgctgacctgacgaatcacttcaagcgtctcgtccgacacgccctctactgctcgcccaaagccacgcatcaattgtgggcgagtccactgtgagaccggcacattttgcgtccccggcggggtgaatacctcaggcgcttgaacttcaggcagcgatgaaacaacttctggttcaggggaggtttcaggctctaccacgacattgtccgacagcaccgcgctcgactccggcgaccgttccagcgcccggccggacaagccgatgccgcccttgattagcagcggcagtgcattgagcgcgccgaaaaccgtgcgcgtaaccccttcattcacctgatcacggttttcggcatcgacgatttcagacacgccttgcgcagcctgaatcagccccgccaaacccaacaggccttctccacccggaaagaaaatcgccaacgccccccagcggttgatccaatcaacgacaggtgtgaccgcagccgccaggttggcacgattgacgtccgcatcatcgcgtatcgcctcccgggccgtggccaggcttgtctgcttgaacaccttgacccattcggcaaacgggtccacggcgttggggaaggtgtccagcaggatgtaatcgtccgggttccaataaccgtcattgttgaaaaagccggactcgcgactcaggtgatgctggcgcgggtactcgcccatcgcctccagtgccgtcagcaccccggcgtgaaaggtgccatcgttgcggtcgtcttggttgaaatgctctgccagggccagccttttttctttggctttgccctgttccacgatccacgtgcgcaatgccgtgatgtctgcgaactgatgaacaggcgacgaattgccaggcacatagagcaacatcaacccgctgacacggtgacggaatacccaaaggtcgcgcgcggtgtagcggtagatcaccagcagggaaacgtcgacatgccccgcaggctgtgtgcgttgctcaaattgggttttgttgatggcagagaactcaacctcattctctgcgagccccgccgccgacaacgccaactgcaagcccgcaagcgtcaggctcgattcaagtttttgcagaaaggcgaccatcacaaaagacgtcttcatcgaggtgcgcagcgcgtacggtgcgctccccataatcgtggtgtccgagggcaacgtgcgcgccagataatcctggtacagctctttgtacccgaggtgccacacccagtccttgtaggccgctggagtgatcgcgagctgtgtcgaaggtccgtaagtctgaggatcggtgcgacggtagatgccctcgtaatcgcggtgattgccgctgccctggtaggcaaactcatcgacctttgcgacgagctttatctgaggacctattgctggaggcgtgtatagaccaaacgcagtttcgccaaattggtcatcggctaccgcctgatagtcactgagcaatgcctgcacgagtgattgctggaaacgaatctggccctgatgcacgccattgatagccggatgaccgtggtagtcataatccagcgtcaccagctgggtggtgacagggtccaggtcggcaccccacttctggcgtatcagggttgcgccgtgctcagccggggtaagcaccaggctgtcttccagggctcggctcaagggtgccagtccattgttttttgaaacggagggtgtcatgcagtcagttccatctgtggttgaagcctgcgactctagcgctggccaccggctcggtagatcaggcaacggcactcggagagggtcctaacggtgatctgttccgtaggcccacgctgcttcccccgcaatctctgcgcccggccttgtaataactgactgttttgcctagcttatgcgccctccccgcccccgcgctttaaggccttgccccatggttttgcgttttcgtcccgtcgtcacgtcacgtttcgccctcggcctgctgctcagcggcggcatcggcactgggttcgcggccgaaatagaattgccagcggtgaaggttcagggccaggacgagtcaggctatcgcacggacaccgcctcggtcggcggcttcaatgaagcccctttgctggatacgccggcctcgatcagcgtgatcaatgcatccctgatcaaagaccagcaagcccgcctgctcagcgaagtgctgcgcaacgacgcctcggtcggcgacagctacgcgcccatcggctactacgaaaactttgtggtgcgcggtttctcgctgaatgcggcgagcagctacaagatcaacgggcgcaccatcaccggcgagcagaacgtggcgctggaaaacaagcagcaggtggaagtgctcaaaggcctggccgggttacagagcgggatttccgaacccagcggcgtgatcaactacgtgaccaagcgcccggaagatgtgcgctcggtgacggtttccaccgatgatcgcggcagcgggtatatcgccaccgacgttggcggctggtttggcagcgagcaacagtttggcctgcgcgccaacgtcgcccatgaagacctcaattcctacgtggaacacgccaatggccagcgcgattttgtgtccctggccttcgactggaacatcagccccgacgcgctgttgcagctggatgcggaataccagaacaagcagcagcggtcggtgccgggctatcaactgctgggcggcaccgaagtgccccacgatgcttcgccgaaaaaactgctggggcatcaaagcggctcccatcaggttggcattgattcgttgaacttgaacggcaagtttgagtaccgcttcagcgatcggtggaaaggcagtgtgagcgcggcgcgcagcaaggtggtgattgatgattacagttcgtttgcctacggctgcttctacgtcaccggttgcggcaccgctaccttcggttccaatggcgactacgatgtctacgactaccgcagccccgatgacacccgccgggacgatgaggtgcaggcggccatgaccggcgtgttcaacaccgcggggctgggccatgaactgactttcggcaccagtgcgtttcgccgggtgatcgataaacgcgatgccgttaacgaatacatcggcagcagtaatatcaacgaagacgccccgacgttcgcgcccaccgacaagcctctgaacgccagccaccgcaacctcgacagccgccagtacggggtcttcgtcaccgaccgcatcagcttcaatgagcaatggcagaccatcattggcggccgtgaagtgcgcctggatgaaaaagccttcgacacagagaccggcgatgaaacacgccacacccagcaatacgtgtttctgccccaggccgcattgatctacaagccggtcgaaaatctgtcgctgtacaccagctacagcaagggtttatcgctgggcggcactgcgccgtggacgacgctcaacagcggtgacaccctcgcccccaccacctcacgccagatcgaagccggcgtgaaatacgactggcgccgcatcagttttgccgccgccgtattccagactcgccaggcctatcagtacgccaagccagacggcacgggcttcttcacctacgtgcaacaaggcgagcagaaaaacaccggcctggaactgtccgccaacggctgggccaccgaccgtctgcagattgccaccagcgtcgccgcaatccgcgcgcgggtgaccggcagcggcaccccggaatacgaaggccatcaggcgatcaacgtgcccaaactgcgcgccagtgtgtacgccgattacgccttgccgtgggtaaacgggctggccgtgctcggtggcgtgcaatacagcgccaagaagtacgccaaccgcaccggcaacgtggaagtcggggattacgcggtggtcaatgtcggcagccgctacaccaccaaactggagggctatgagacggtatttcgcctgagcgtcgacaacctgttcgacaagcgctactggcgcgacgcgggcgaatacctgggggatgactatctgttccagggcgcgccattgacggcgcgcctgagtgcaacggtgaacttctaacgcttacttgggcatcttgcgaaagccgatcgccaagcggttccagctgttgatgatcgtaatcgccaggctcagatcaacctgttcctgggcgctgaactcggcggccaatgcgttgaaatcctcgtccggtgcgtgggtctggctgatcagggtcaggctttcggcccaggccaacgcagcgcgctcacgcggggtgaagaacggcgtttcacgccaggctgacagagtgtacaggcggcgctcggtttcaccgcctttgcgggcgtcggcggtgtgcatgtccagacaaaacgcgcagccgttgatttgcgagacgcgcaagcgaatcagctccagcagcggcaattcaatggacagcttgccggacgcggcttccagggcgagcatggctttcatggcatccggggaagcggtgtagaaatcggtacgggttggcatggcggtactccggaacggtgggaattggtggctagattagccaccgatggcgcccgtagaaatatccaattccagggaagaatgggtgaccaatgcgctcacaaccccctgcttctcaaccactgcataaagccttttttgaccggcaccaccggtgcatcctgagtcagcgcctgcgcggcgtgcacgcgaaaatccagcagcgccttcatcgcctcgctgatgtcatgccgcgcatccaggcatggcttcaaatactctttctcaatccggtacagcgtgcaaaacgtcttcgccgtaaagtccgccaacgtcgcctgatcggacagaattcccgcctcgccgatcacctcccccggccccatccgcccggcctcgaacttgtggccgcccttgatcagcatcaccgacaccacgccggattcgacgataaacaaatgatcgctgacctcgcccgccggcaaaatcatgtcgccggcccggtaggtgtgcagggtcatgttctggctgaaggtttctttctcttcctggcgcagcgtggagaagatcgacgagcgctccaacaaggcccgcgcacccgacattgcgggcggggcagtgctttcggtggcggacaaaatgcctacccccgccgcctgcaggtgccggaatgccaggtcgtagagttgattgcgcacttcgcgcttgaggcccatggccggtacaaaaccactgatctcatactccacgccaccgctggcggaggccttgaacgcgacactcggcgcaggcttggccagcaagggccggcagccctgcatcgcgcgctccagcgcctcgatcaccacttgtgggcgtgcatgggggctgatttgcaggctcaccgccaggccgaacatatccgccggtcgggagaaattgatgatcttggccttggccgccagtgagttggggatgaccgccatgctgccctgggaggtttgcagccgggtggcgcgccaatcgatgtcagtgacccggccctcggtaccgtcgatggagatccagtcatcgatctggtaaggcttggtggtgttgagcacgatcccggaaaacacgtcgctcaaggtgctttgcagcgccaggccgacgatgatcgccacggcgccggaggtggccaatacgcccttgaccggcaggtcgagcacgtaggccatggcggcaatgattgcgatcaggaaaatcaccgcgcccacgatgtcctgcaacagccgcccggtgtggccgacgcgttgcatcatgactgcgccaatcaacaccgtcagggtgcgcgcggcgaacagccaccagccgatctgcaaggcggtagctgccaggtgcaaggcggtgttgtctgcataaggcgcggcttgcatcgggttcatgccgtcgttgaagagcacggcactgaagatcgcaaagatgaccaaccgcgccgcgagcttccagttggcgaggtcagcggaaataaggcgccacacggcgatgtcgataaaaatcagcgccagggcgcaaaacatcgggtgatcggcgataaatgagggcatccaggcgactccgtggcgaatgcgctgaagatcgcatgaattgataaggctggaaacaaaatgtgggagcgggcttgcctgcgatgcagacacctcggtgcttcagttacacccaggtgatgctatcgcaggcaagccagctcccacagggttactggctcacagtcaggcttgcatctgaccaaatcgacccgactggaaatccgcaaacgcctggtggatttcctgctcggtgttcatcacgaacgggccgtggccgacgatgggctcatcaatcggctcgccgctgagcagcaacaccttggcgtcatcgttggcttccagggtgagctggcggccatcacgctcgaacaatgccagttgcccttggcgcgcaacgtgctcgccattgaccagcaccgtgccgcgcaggatcaccagggcggtattgcgcccggcgtgcaggtcgagcgtgacggctttgccggcattcaagcgcaggtcccacacgtcgataggcgtgaaagtgcgggctgggcccgtgctaccggcaaactcaccggcaatcagccgcagttgcccggcgtcgtccgccagcggcagtaccggaatatcaccatcgacgatggtctggtaaccggcgtcggccattttgtctttggccggcaggttgacccacagctgcaccatctccagcgccccgccactgcgggcgaaggcttcggaatgaaactcctcatggaggatgcctttcgcagcggtcatccattgcacgtcgccggggccgattttgccgccggcaccggtggaatcgcggtgctcgacttcgccgtcataaacgatggtcacggtttcaaagccgcgatgagggtgttggcctacgccacggcgttgttcggtcggggtgaaatctgccgggccggcgtggtccagcaacagaaatgggctgatgtgtttgcccatggtgtcgtaggaaaacagcgtgcgcaccgggaagccgtcacccacccaatgggcgcgagggctggtgtagataccgataagctttttcatggtgtacctccaaagtgcctacaccataagcccactcgcgtttatgcactagccggcaaaagcggctcggattgttctaggtataggacaatccgttgaccttacgctggcgcagcaggtggaacgcgacaaaggccatcaacgcaaaaccggcctggatgacgatcatcggtgtggcgcttccatcacgcagatggctcaataaaaggccgctgcaagtcgcgccaaacatctgcgaaaaacccatcaggcccgcggccaaaccggcacggtgcgcgttgggcatcacgccaccggtgaccgagcccggcaacaccagcccgccgccaagggtcaccagtgccaccggaatatccacgcccattactgacagcccgaacagcgcataaatcagcaacgccgagagcccgccaacggccaccattgtcacgcccatcgccacaattcgctgggggcccaggcgcatgatgttacgtcgcgtgtaggtggagccgatgatcagcatcgacacgatcaggccgaaattgatgccgtattccaggctgctgaagcccagcaggttgatgaacacggcggatgagccggcgatcaccgagaacatcgcgccataggtgcaggccagggccacggcgtacgcgcggtactggcggcctttgagcaaatccaggtattgaccgccgagggtgcgccagtgaccggcttttggatcgaggtagtggttgctttcacggaaaaacagcagcgcgagcagcaacaccacgctgccgatcaccagcgcgaggatgatcggcgcatgccagccgaaaaacttgatcaacacgccgccgaccatcggcgcgaccacgatcgcgtagagcatgccgatcatggtcagcgccagggcgggccccgcctcggccttccacacatcacgcaccacagtgcgcgccagcaccaatgccgcgcaggcgcccaggccttgcagcacacgggcggcgatgaactgctggatatcgctggccagcagcatcgataaggttgccactacgtacagcgccaggccgccgatcagtaccgggcggcggccgatgcggtcggacagcggcccgaagaacagctgccccaggccaaatgcggcgacaaacgccgacaacgccatcaaggccgaccccgccggtgcagccagcgcctgctcgatggcgccgagaccgggaatcatcaattgggtcgagacttcccccaaggccgtcagtgcaaccagtagaaacaacaaactgcgtgagggagccggggcgtttgccatgggggatatccgggggctggattaatttatatttcgaccataatatgggtaaaaaattatgtccataattttttacccgacggtcacccccatggaggcccaccatgaatgctctcttcttgcgactgctcacgtcgctaacgcttttgattgccctcagtggctgcatcgaagtgcacacgccccgccctgcgcaggccgtaaaagtggacgcggccgacaccctgcaaggcgttgtgcacctgacccgcgagggtgcgcgcgaagtcatcgtcaagctgccggaaagccagcgcgaccaagcctcacccagagccctggccttccccttcgatgcccccgaacaagctgtcaccgccaccttgcgcgaactgcctgccagcgtcgacccagccacgcacacttaccaggcacgttacgtattgcacggcgccgttggccgtttcacccccggttccactctcgcggtacgcctgcaaaacaaccgccaggcccagtaacctcgcaggcgtacaaaagctgctgaaacctcccacatgacagcgggataagctctacagatatcgcctgaaaacctctgcaaagtccttcgcctgatcacacagtgcgagggattgcagatggtttttttcgttaaagccctgaccgtcagggctgcttcttgatcgccgctacgggccaaaccattggcttgctggtgctggccgccatggattcgaagacccgcgacgtcgaatccgtcctcagcgatttcaaacgctgcctcaacagctacgacacttgggcggaaagctttttcagcttttcggcgctggctatcgaacaggtattcaaggtcggcgacgaagtggcgctggtggcgccgatcaaccgttcgatcctgcccagcagcaccgtcgccacctgcaaggccaacggtacgctgaccctggtgcacatgtttcaaagtgcgcggtttgtgcccatcggcaataccccggtggtactgcaacgggttgaccctgcaggcggcccgctgggcgagcccatccacaaaaccatcggccctagcggcatccttgaagtcaccgggtgtgatcgcaaccagcagtaccgggtcaatttctatcctgatgtttccaaagcccattacaaggcgctgtacgcgtcttatcagtcagtcatcacatcgctggaaggctggctgcgcggtgaatgggaaaccacttttgcgccgctttggaaaaactactccgaggcgaactttctcaagcgttacctcaccttgcacgaagcttatgcacgcgggtttggccaggcgctgaactcgctgtgggacgacatcaagcagctgtttgaatggatcacccacccgctggtctacgccgaaaaactgctgcattacctgtcccgggccgagtttgaaaagctgctggcactgagcgcagatgcccttgcaaaaggcttgctgatactcagcgatgagccgctgatgtttattcacttgtcggcatttgtcagttggatgcggttgctgccgccaccgtacatgaacgaattgctgggtgagatcagcggtgaggtgctgatcaacctgctgttggtctgcgtcactggcgggatgggcctggtggcacgtatgagcccgaaggtgctgggcggcatcaagtctcgccgggcacgtgagtggctggaacgcgttgccggtcagtttgcaaaggttcgcgcggatgagcataccgagttggccaggccggttttgctgggtgggccggcggctgacatcaaggtgattccggccgcgtccatgaaggcaggggatcagttggtttcgaacgcggtgccagcggttcgggacaagcgagttcagcgcacggcgctggttcggcaagagcctgtcgatgatgcgcctgcgtccggcaaaaaccctgcaggcgacgcagcggctccggccgataaaaccgtgaccaacggttgcccggtgtcgatggtgacgggcgaggaattactgaccctcgttgacggcacgctggacgggattttgccgttcgagtggacgcggttgtatcgcaccagtgccgtggaagtggattgcgggttggggtttggctggagccattcgctggcgcagcggctggtggtggccggtgattcggtggtgtggacggatcacgaaaatcggtcgacggcgtttccgttgccgacggcttcgcggcctgcgatcaccaacagcctggctgaagcggcgatctatctgggaacactccccgacgaattggtgctggctcaggactcgcggttttaccactttcgcgacggtgcgctgacggcgatcagtgatgcgtatgacaactgcctgcaggtttttcgggatcggttgggacgggttgagcggctggacaatggcgtggggcgctcgctgtttctgcgctatgagcgcggccatattgtcgccgtggagtaccagattgaacgggccgaggggccgggcgagtttgtctgggtcactgagcagatcgttgtttcctacgcctatgacgcagcgggtcagttagtttcggcgaccaatgcggtaggtgaaagcgaggtttatcgatacgacgaacagcacgtcattcttgaacgccaactggccggtggggcgagtttcttttgggcgtgggaacggtccggcaaggcggcgcggtgtgtccggcactgggcgagtttttcgcagatggacacgtgttatgcctggggtgatgacggccaggtcacggttaaaaacgccgatggcagcacggaagtctacgtgcatgacagccgtgcgcggctggtgcagcgcattgatccggatggcgccgagtacttcaagtcctacgacgaaaagggccggctgacggtcgagcaggacccgctgggcgcggtgacggcgtatcagtacgacgacgccgggcgtttggtggcgttgtttcccggcgaggatgagccgacttcctacgagcatgacaacggtttcgtacgggttgtacggcgtggggaggcggtgtggaagtacgagcgcaatgatcagggcgatgtcacgcgcaagacggatccctcaggtaacgtcacggactacagctacaacaaatacgggcaactgaccgggatttggtatcccgaccacagttgtcatcggctggtgtggaatgagcgtgggcagctggttgaggagcaactgcccaatggcgggattaagaggtatcgctatgacgacctggggcggcaggttgcgcgtgaggatgaatttggcgcgctgacgcagtatcaactggacagtgttggccggctgattcgcattgtgttgccggacggcggcacacgggaatacagctacaacccctacggaaaaatcaccgctgaacgtgacgagttggggcacgttactcggtacgaatatggcgacgggttacatctgatcagccgtcgtatcaacgctgacggcacccaggtcaagtatcgctacgacaacacgcgattgctactgaccgaaatcgagaatgaggtcggcgagacctatcagctcgcctatcaccccaacggtctgatccagcaggaaaccggctttgacggccaacgcaccgcctatgtctacgacctcaacggcaacctgcaggaaaagaccgaacacggcgacgacggcagtcagctgattacccgctacacgcgagaccacgccgggcgcctcgtacgaaaaaccctccccgacggcaaatccgtcgactacacctacgaccgccagggcaacctcctcggcgtcaacgacggccactgggcgctggcctacgagtacgacagccaaaaccgcctcaccgccgaacaccagggctggggcaccctgcgttatggctacgacgcctgcggccaactgaaaaacctgcgcctgccagacaacaaccggctcaccttcaaccatggaaaaggcggcgacctcaccaccgtcgaactgaacggcgcccccctcacctctcacctgttcaaggccggccgcgagcgacagcgccagcaaggccagctcatcagccactacgggtacgacgaacaaaaccgcctgcacgcccatgcggtgacccagcaaaggcacgatctttatcagcgccactacgactacgacaaaacgggcaacctcagccgaattttcgacacccgcaagggcgagcaccactaccgctatgaccctctcgcccgcctgacccgcgtcgatcactcacaagacgaacaggaacgcttcggccacgacccggcgggcaacttgctgatgcaggaccgcccagggccggacatcgtggcgggtaaccggttggcgatacagggggatcatcattatgactatgacgcgttcggcaatctgatccgtgaacggcgcgggcgtgaacatcggttaatcactgaataccgctacgactgccaacaccggctgatcggcatcacccgaccggacggccaaaccgccagctatcgctacgacccgttcggccgacgcatcagcaaaaccgtcgacggcaaaaccaccgagtttttctggcaaggcgacaaactcatcgccgaacaccacgccgatcgccatcgcagctatatctacgaacccgacagcttccgcccgctggccctgctcgaaggcttcggtccaaaagccacccagcctttctattaccagctagaccacctaggcaccccacaggaactcaccgcccccagcggcgagatcgtgtggtccgcgcactacaaggcctacggcaaaatcagccggctggacgtaggcaaaatcgacaacccgctgcgcttccagggccaatacttcgatgcggaaagcggcctgcactacaaccgccatcgctactacaatccggatctgggtcgttacctgacgccggacccggtgaagctggcgggtgggatcaatgcgtatcggtacgtgcctaaccctacggggtgggtggatccattaggattgagtacctcctgtcccggagggaatgaatgcaagtcaggcagtaccctccaaaacccaacagctggtgttaatcacggggagccggacttaccacggctgtcacgtgaacagcgacaagcgagaattgatcagcttgcagaggctaacgcgtaccgacgattggatgagctagaaaaagcaacacccggagcgcacttcttggaaaaacacggagctcagacaacgctggaatctcagttagaaagactccaaactgcaaaaaaccctacaacaggaattgttgaagtctatacatcaggaccaaatagaggtcagcctaaatatccacccgctgctactcgataccttagccacagggaccaattgaattcgatatatagagcgcagctcatattcaaaagcagcggccatgctgcatcattaaaaccaatgaacatggacaaagtaatcggcgatggttatgtgagagaagggaatacatatggaaaaaaccgtaatgcacgagtgatactagaccaacatggcagacctaaaactgcttatacagaatgaggaaaaatatgaaaaacaagccaagcatgtcaataatccgaggactactattcacatatgacattgagaatactgatgacatagaaagagaaaggcttatttcctcaaaaaacgtgaacgatgagaaagaactttcagatctctttgacaagctgaccaaaccggagtttttatcatatacaaaaatcgagcaggagtggttcattaattcaattgaatactacctatccacaagcgacaacttcgacgaagtgttcaaaacaatgacgacatacttcagcacccccataaacaatcaaagagattttatgctagtcctcctgagccgcctaaaaaaatatagcaaaccagatgattcggaatattgacagtcaactaaaaagcacctccccactctctcccgtctggaggagcgggcacactcgtcggccacaaattcagccagaaccacatcgccagttttagggctgctacgcagcccagcgcgagcaagctcgctcactacaaaaacttgcgaccctaaaggggactcacccaaaccgaatgagccgccccctcaactcaccgcttactcaactcgacaatcatccggctcaacaaataaacccgaggcaccacactttccacctccgcatactcctcaggcgtatgaatattcccgcccacaatcccaaacccatccagcgtcggcgtgccaaccccggccgacaagctggcatccgccgccccgccactgccttcaatcgtcaatttgcgtccaatctcgccataaatcccctgggcaatcgccaccaacttatccgactccggcgtctgcggcatcggcggtaacccacgcaacaacgtggtcttcacctcggtttccgggatcagcttattggccgacacccgcgcaaggtctttctcgatgcggtcaaactcttccggcaacgccgcgcgcacgtcggctttggcggtggcctggtcggggatgacgttgacgcggtcgccggccttgagcacggtgaagttgatggtggttttcttctcttcatcgcccagtttgcccagttgcaggatctggtgcgccgcttccatggcggcgttgcggcccagttccggggcgacaccggcgtgggcggccttgcctttgacttcgaccacggcggtggcgctgcctttgcgccacaccaccaggccgtcggctgggcggccgggttcgaggttgagggttacgtcgtgtttcttggcggtggtgcggatcagttcggaggccgcttcagagccagtttcttcgctggcatcgagcaggaaggtgatttgtgcatagtccttgaagccctggtttttcagaaccttgagcgcgtagataccggcgacgatgccacccttgtcatccatcacgccggggccgtaggcacggccgtccttgatgtggaacgggcgttcggcggccgagccttccttgaacacagtgtccatgtgggccatcagcaggattttggctttgccggtgcccttgagggtggcgaccacgtggctgttgttggcggctttgtccggcaccagttcaatgctgaaacccagctgtttcagctcgtccacggcgatgtcgcgcacttgggtcaggcccggctcgtagccggaaccggagtcgatattcaccaggcgctccagcaacttcagggcctcgcccttgtactgttcggcatccgcctggatttgcttgtggggttcggcgctgtaggccggtacggcaaaggacaaggccagggtcgcggccaggagggtacgtgagaaggtgaagagcatgaaccgatccttgtttttgttgggagggacgccacaccctaccccactaaaccgaccgtaaccaactcccctgcactgaactgacgcggttgcgcccgctgcttttggcttcatacaaggcaaggtctgcgtcgttgagccaactggtggaatcggcgtgcgtcggttgatacggcgccaggccgatgctcaggctggcgcgcaaggtggggtcctgggcgtaggccaacgcattgaagcgatcgcgcaaggcatccatcacttcagtggcgcggttgagcggcatgtccggcaggatcacgcaaaactcgtcgccgccgtaacgcccggcaaggtcagtggcgcgcaggttctggcgcagcaccttgctcagttggcgcaggacgatatcccccgtcacatggccataagtatcgttgatggtcttgaagtggtcgatgtcgatcagggcaatggccgcgccggcctggcttcgccggcagcgttggaattcgatttccaggtggtctttccaggcgccgtggttcagcaggccggacaggctgtccgttcggctcagcgccagcagctcacgcttgtgccgggcgagggtcacagcctggcggtagcagatccagcccagcgccagcgggtaaagcatcaggatcggcaggcaagcatacagctgagcctgggtggtcacggcgataaacgccggggtgaacatcagcaaggaaacgccgatacccagcgcctgcgccacccagccggcaaacatgaaccgcggcccgccgatggcgacattgttcatggtcatcatcgacagcgtcgtcacgctgggcagcgggttgaaatgcatggcgccgacccagaagccgccgcaaaaggaatcgaacaacaggttgcgacgctcactgcgcaaggcattggtggcgcgcagcgtcgattgaaaagccaagtgcggccaggcgaaggcgttgaacaccatccaggcccatacccacaacggcgggttgagcgggtacatgccaaacaccacgcacacgaaaccgagcgtcagccccagggaacgggatttatacaagcgggtagcgagcggaagtccatttcctccgacggctgacatagcgtggtgtgatcctggatgaatgcctggagtctatcagggcaacgtcaaatcgccactaccgctcataaggccgctcagtgtgagaaaccatgggccagcatcactgccacacccagcaacagcaccgccgtgatccgctgcaacaacacccgccgcctggggttttccagcacgtgtttgatgcgctggccgaaataacaatacaggcagccgctggcaaactgcagcgtcagaaaggtcagcccgagaatggcgatgtccgccgccgaactgtgctccccggcaccggcaaactgagggaacaccgcgctgaacatgatgatggtcttggggttggaaaacccggtcagcaagcccttgccgaacaggctgcgcgagccttccacggtaccggccttgcctatcgacacgccgctgctggtccactgcttgtaggccaggtaaaggatgtaggccacgccgacaaactggatggtctgggtaatcgcgatattgcccttgatcagctccgagaagcccacggcaaaaatcaggatcgaaatcaggtacgacacactggcgccaatctgcgccgggatcgagctgcgcaggccgtccttcaagcccaggctcaacagcagcagggtcatggggccgggactgaacgtcatggtggcgcaaaacaacagaaaatacagaaacgaagacagcgttaacgcactggtcatggtccggggccttggatggatagaagcaacaacaacgggacgcgcaccctgagcgcgcgccccggggcacgtcaggcgaccgcgatttcggtcgtgagggattcgcggtacatcagcgccaggtcagccagggctgccttggcggtctggttgcgggtttcgaaagccaccaggcctttccagttggtttcgacgatggcctgcaccacgtcggcgtaatcgcagttgccgtcgtggattccgaagtgctgatcttgcacgccattgttgttgctgaaggaaatgcctttgatcaggtggtgatacttgcgcaccacttcggccggcaagccgttctcgatgttggcgtggccggcgtcgaggaagaagtacacattgctgtgcgcctgcaaacgctcgaacacaaaggtgtattccgcttcatgggtgaagatgtagtggaacggccggtagttgacgtagttggacaggttttccaggtagatatcggtgcccttggcctcggcataacgggccaattcctgcaccgatttgaggtaatgctccagcgcgactttcttggccatcagcaccatttttggctcgacgatgcagccaccgtggatgatcaacggcgcccccagacggctggcgatgtcgatttccttcttcacgtattcaaccgccgccgcacggaaggcctccacatcgctgcccagcggcgccttgaagttgccgtggaagaccggcttcacacccgttgcctcgatttgcgcctgcaaaccggtgatacgctcttcgctccagtcatcgaccatttcgccaaacaggctgccgtcgatgtaccagtgggtgcagttgccttcgaccgccgtctgcaggcccttttcggcgctcaggtatttctggtgggccacaccggtacagaacggtacggtggggttgatcagtttgctttccatgaagcgattcctttcgttatggagcgttaaagttcgatggccatgaaatcggccttggtcacgccacaatccgggcatgtccagtcttccggcacctcttcccaaggggtgcctgccgggattccgtcttcgggaatacccaattcttctacgtacataaaaccgcagggtgcgcacatataagtcttcatgagagtgcgaaatccattgctcgcgtgtaaggaaagttcgccaattcctggcgagatggcgcgcagtctaggggagcggcattgcacaaggcaggtaaagtgatgcctaatccggcctaacttcaccggtaaaagcaccggtaaagaagaggaaggtttatgtttgtatccgccatcgcttttgtggacggcattcccaaggtccagcaaatcgtcgaagcattcagccaggccatcgaaaacggcgaatgggcgcccggcagcaagttgccgtcggtgcgtgaattgacccagaccctgggcgtcagcaagttcaccctcaatgaggcgctggaccgcctgcgcgggcgcaacctgttgacctccagccagggccgcggctacttcgtggcgatggacaccgcccgccccgcctcggtggcctgggtggatttgctgccgcaggatttgctcagcgtgctgcgtcgcccgctggtcaccgccagcggcgagctgcgccccggtggcggccacttgccggaagactggctgaacgccgaagccatccgccaagccatgcgcagcgtggtgcgcgcgccgtcgttgcgtatcgccgggctgggcacgccggccgggctgctgccattgcgccaggccctgcaacagaagctgcacagcgaaggtttatcggtgccgctggagcaaatcatcaccacgcccaacaccgttcagggcctggacatgctcatgcgcctgctcgcccgccctggcgacacggtgctgctggacgcgccgtgctacttcaacttccacgccaacctggccctgcacggggtcaaggtggtgaccatcgcgcgccgccccgacggcttcgacttcaccgccctggaacagctgctggccgagcaccgccccagcctgtacctgaccaccagcgtgctgcataaccccaccggccactcgttcagccccagccaggcgtttcgcctgctgcaactgacccggcaataccactgccatatcgtcgaggacgacctctacggcgaccttcatccgaacccaccaccgcgcctggccgccctcgccgggctggaccaggtcacgtacttgtcaggcttttcgaaaatcctcagcgccaacacccgcgtcagctatgtggtggccgcgccgcaactggcggccaacctgaccaatatgaagttgatgagcggcggcgtgacctcggagctgttcgagcagattgtgtaccgcatgctcagcgaaggcagttatgccaagcatcgcaaacgcatggtgcagcgattgatggaatctggcgggcgcgtcgaacaatggctgaaacgctgtggctgcgagctgccgatggcctatgaaggcgggatgtttatctgggcgcgcttgccgccgggggtgaacggcgagctgctggctcaagaggccttgaaacgcagcctggtgttggcgccgggagcgttgttcggctatgacccggcccaccgtgattcgatgcggtttaacgtggcccacaccgatgagccacgggcgcagcgggtgtttgaagcgttgttgctcaaggccgtgcgcggcccttgagcatgccgtggttgaccaacaaggtacgcatggcgttgcgggtgatgcccagcaagtccgccgtgcgcaattggttgaagccacaaaaggcaaaggcttcgcgcacgatcaagtcttcgatgtcgtgcagcaacgtgtcccccggcacctcgaacaacctcagcagttgctcacgcacgacctcctgaggaatgcgcggcgcgccgttgttggcgctggcgtgcagtgcactgagcccggcagaaaacttcaggtggctgggcatgatcggcttgtcaccggccaccaacagggccaggtgcaccacgttttccagctcgcggatattccccggccatgggtaatccagcagcgcctgagtggcggattccgagagcatcggctcagcgattttcagcttggcgctgtacagccgccggaagtgctccaccagcggcaggatatccagcggccgctcacgcaggggcagcacctgcacctgggcgacgttgatgcggtagaacaagtcgagacggaaattgcccgcctccaccgcctgttccaggtcgatgttggtggcggtcaccaggcgaatattgatcttgatcggcttgcgcgagcccacccgcaccacttcctgctcttgcaggacgcgcagcagcttcacctgtaaaggcaggggcaggtcgccgatttcatccaggaacagcgtgccgccatccgcctcttcaaaccagccgccgcgccggcccactgcaccggaaaacgcccccgcctcatgcccgaaaaattcgctctcggcgagggtttcgctgatggcgccgcagttcaccggcacaaaggcaccggtacgcccgctggcgctgtgaatgtagcgcgcgaccagttccttgccggtgccggtctcgccattgatcaacaccggcgcttcactggggcccacgcgttttaaataatcgagcagttgcagcgagcgcgggtcggaaaataccagggccttggcgcggatcgacagcgggtctttttcgccctggggcaaagtcaggatcggcgtgggctgcccgtggggacggttcatggactatttcccggcggcgagataaagaagtgagcgtgactttacccagccgcacatataaccagaaatattaaaaattcattagcacataaccatttagcagaatttcggccactcaaaatccaccgtaacggcaattttgcctcgtcgtgtatctgcctgtcgccagatacactgcaatacaaagggcacaaggcaaggggctcgccagtggctagactgcgccccaataagcatttaacgaggaaggcagcatggatcatgtcgatcacatcctgatcgtcgatgacgaccgggagatccgcgaactggtgggcaattacctgaagaaaaacggcatgcgcaccaccgtcgtcgctgacggccgccagatgcgcagcttcctcgagaccacccccgtcgacctgatcgtgctggacatcatgatgcccggcgacgatggcctgcagctgtgccgcgagctgcgcgtaggcaagcacaaagccacgccggtgctgatgctgaccgcccgcaacgatgaaaccgaccgcatcatcggcctggaaatgggcgccgatgattacctcgtcaaaccctttgccgcccgcgagctgctggcacggatcaacgctgtgctgcgccgcacacgcatgctgccaccgaacctggtggtcagcgaaaccgggcgcctgatccgttttggccgctggcgcctggacactaccgcccgccatttactggacgaagacaacacgctggtggccttgagcggtgcggagtatcgcttgctgcgggtgtttctcgaccatccccaacgcgtactgaaccgcgaccaattgctcaacctgacccaaggccgcgatgccgatttgttcgatcgctccattgacctgctggtgagccgcctgcgccaacgcctgctggatgacgcccgcgagccggcctacatcaaaaccgtgcgcagcgagggctacgtgttttccctcgccgtggaaatcctcggggccgaccaatgaaagggcgcttgggctggccacgcaccctggcgtcgcaactgtcgctgatctttttgatcagcctggtgtgcgcccatggtttgtccttcagcgcgcagttctacgagcgctacatcagcgcgcgtacggcgatgctcggtaatctggaaaacgatgtggccacctcggtggcgatcctcgaccgcctgcctgccgacgagcgcgccagctggttgccgcggctcgaccggcagaattaccgctacctgctcaacgcgggcgaggccggggaaccgatgaacagcgaagacgtgccgatggccgccacttccatctcggacgcgctgggcgagcactacgccctgacctttcgcgatattcccggtatgcaaaagcacttccaggcccacctgaccctggccgatggcaaccccatcaccctcgacgtacgccccgccgccctgcccgtcgcctactggctgccggtggtgctggtgctgcaattagcgctgctgctgggctgcacctggatcgccgtgcgcctggccatccgcccgttgacccgcctggcccgcgccgtggaaaccctggacccgaacgcccacccgacccctctggacgaaggcggccctactgaagtcgcccatgcggcggcggcgttcaacgagatgcaaaagcgcatcgccgaatacctcaaggaacgcatgcagatcctcgcggcgatttcccatgacctgcaaacgcccatcacccgcatgaaactgcgcgccgagttcatggaagactgcgccgagcgcgacaaactctggagcgacttgagcgaaatggagcacctggtgcgtgagggcgtggcctacgcgcgcagcgtgcacggcgcgaccgaggccagccaccggattgatctggatgcgtttctcgacagcctggtgtttgactatcaggacatgcacaagcaagtcagcctcagcggcaaaagcgcggtggtactggacacccggccgcatgccctgcgccgggtgctggtgaacctggtggacaacgccttgaaattcgccggcagcgcggagctggaggtgggctcgacggcggcgggcgagctgtcgatcaaggtgctggaccgcgggcccgggattgccgaggatgaattggcgcaggtcatgcaaccgttttaccgggtggaaagttcgcgcaatcgcgggaccggcggcacgggattggggctggcgattgcgcagcagctggcggtggcggtcggcgggtcgttgcgcttgagcaatcgggcgggcggggggttgtgtgccgagatccgggtggggctttgagcaggcggtgtgggagctggcttgcctgcgatgacggcgcatcagttgttgatgcagtgactgacaagccgctatcgcaggcaagccagctcccacagaaaagcagaaccgatccccatcacccaggcagcggaatcacccgcaaccgccgcaccgacttatacgaaaaactcgaataaatctctttgacgcacggcagcgtctgcaacacctcccgggcaaactcaccaaacgactccagatctttcgccaccacttcaagcaaaaaatcatagcgccccgacacgttatgacacgccaccacttcaggaatctccagcaaccgctgctcaaacgcccgggcgatttcctgggtgtggctctccatcatgatgctgacaaacgccgtcaccccataccccaatgccttcggcgacagaatggcctgatagccgctgatcacgccgctctcctcaaggttgcgcacccgacgccagcacggcgaggtcgtcagggagacccggtcggccagctcggccacggtcaagcgggcattgccttgcaacgcgtttaaaagcgctttgtcggtgcggtccagactgaagggcatggtttgcctcattttattgtttttaggggcttttcatcccgcaacgcgggattttccggcactttttgcaacgttcatctgtggttatgagcatagcattgtaggaaataaggagcgtccgacatgaacaataaacacaatacattcggcttttccacccgtgccatccaccacggctatgaccccaaagaccaccacggggccctcgtgccgccaatctatttctccgccacgttcgcgtttcccactgccgaatatggcgctgcctgctttgccggggaggcgaacgggcacttttacacacgcatttccaacccgaccctggccctgctggagtcacgcatggcgaccctggaaaacggcgaagcagcggtagccttcagctccgggatgggcgcgattgccgcaacgttctggaccctgttgcgccccggcgatgaggtgatcgtcagccagaccgtgtacggctgcacctttgcgctgctgcaccacggcatcggcgaattcggcatcaaggtgcgccatgtcgacctcaccgaccttgacgctctaagcgccgcgcttacccccgccacgcgcatgatttactgcgaaaccccggccaaccccaacctgcacctggtggacatcgccgccgtggccaccctcgcccatcaacaccccaatgtcaccgtggtggtcgacaacacctattgcacaccttacctgcaacggccgctggaactgggtgccgacgtggtggtgcattcggccaccaaatacctcagcggccatggcgatatcactgccggtatcgccgtgagcaaccacgccctggcgcaacgcatccgcctgcaagggctcaaggacctgaccggcgcggtgatgtcgccccaggatgcctccttgctgatgcgcggcctcaagaccctggccctgcgcatggaccgccattgcagcaatgcccgggcggtagccgaagcgttgcaggcgcaccccgccgtacagtgggttacctacccgggcctgcgatctttcccacaatacgaactggcggcgcggcagatgaaacaggccggcggcatgattgcctttgaactcaagggcgggatcgacaccggccggcgcttcatgaatgcgctcaagctgttcacccgcgcggtcagcctgggcgatgcggaatcactggcccagcacccggccagcatgacccactccacctacacccccgaagagcgcgcgcaacacggcatcagcgaaggtctggtgcggttgtcggtcgggctggaggatgtggccgatctgctcgcggacgtccagcaggcgttggccaaatgcgcccgggccgcgccgcgccaggcgatgatggcggggcatgccgtgagataagcccctcgctcggcgttatcctttcccacaaacgatggtcggacaggtccgaccatcgttatgcgtttttaatctgattttttgcagattggatccccctgcttttgccaggctgtactaggatacgtctcggcgggcgcactatcactgtaggttattcaacgctgtcaccttcctggaccccgtcgctataaggctgaattcctacactcgaaactcatggatgaactgatgaactcacacctgttcccacatataggcaaggtcatcgccagcaccggcagtcgccatttcccacgcatgctgcatgacctgatcctcacccaactggcagtggacgccacgcatatcacgcaattacgggtgaaccccgaagggcacacccgccgcaagatcagcccggtctacaccgattcggtggcggccctgggcgaagagcaacccgccgcacaactgcacctcacgcgccgcaaggacgatgtgcgctatgtgctgtcggtgtaccgctcacaccagtccgaaagcttctcgccacaggagcgcagcatgctgcaggacttctccacgttgctgctgcccatggtggaaaagcacatcgccgcgattcaaccgtgccgccaggacagcgaaccggtaatgccgcaaaaccagggcatcgaaaccctgcgccggcgcattgaagagcggctggtgcagtcggggctgaccctctccaaccgtgaactggaagtgtgcgtgggcttgctcgccgggcgcaccgcgcctgagttggcggagcaactggcgctgaaggtcaataccattgaaagctacctcaaacgggcggcgatcaagctggggatcagcgggcggcattcgttgttgcggtggatgtattccacggacgacggatccaccgccactctctaaaccaccacgacaccctgtgggagctggcttgcctgcgatggcatcaaccgggtatgcctgatgtaccgagttgcccgcatcgcagcggtgcgacgattcgacaagccagctcccacagttgatctccacttgtcagtgagacctgctccgctcagtccctggccaacgcctcaatcgggtccagccgcgccgcattccttgccggcacaaacccgaacacaatcccgatcagcgtcgagcatgcaaacgcagtaatgatcgagcccactgaaaacaccatctcccattccttcacaaacaacgaaaacagatagccgatggcataggacagcgagatcccgatgatcccgccgatcaggcacaccatcaccgcctccaccagaaactgctggcgaatgtctgattggcgcgcgcccaccgccatgcgaatgccgatctcgcgtgtgcgttcggtgaccgacaccagcatgatattcatcacgccaatgccgcccaccagcaacgaaatcaccgcaatcagcgacaacagcaacgccagggagcggctggttttctgcacggtttgcatgatgctgtcgaggttgttggtgaagaaatccttggtcccgtggcgttgcagcatcagtttgttgacgttgtcttcgaccaccttgctcggctggccgtccttgatgcgcaccgtgatgctgtccaggtggcgctggcccaacaagcgccccgccgccgtttcatacggcacccacacgttgagcgccttgctggcggcaaacatgtttttgttgtcggccgtcacgccgatcaccgtgcacggcaggttgcccaccaggatcacctggcccaacggatcgacgttcggcccgaacagacggtgacgggtgttgtggtcgatcaccaccacttgagcctggcgccgcgcatcgctttcgctgaaggcgatgccggcttcgagtttcagccccttcactttgaagtagcgatcactgacgccattgacctgcgcatccacgtcaatattgccaaaccgcagcaacaggttacgccccaccaccggcgtggcgctgtcgacgtaatacagctggttgagcgcctccacatccgagggcatcaaggtctcgatggccgaggcgcggctgtcgccaaaactggtgccggaaaagatatcgatggtgttgctgccgatcgcctggatgtccttgagcacataacgcttggcaccctcgccaatcgccgagatcgacaccaccgaggtgatgccgatcacgatgccgagcatggtcagcaaggtgcgcatgcgatgggacaccagcgcgacccaggccatgttgaaggcttccttgaacaaccccaggctcgccaccagacgccgcgcgccgctgcgccgaggctcgatcggggcctcgctcggcaactccaggccgacgctgtcgttggtcttgtcgctgacaatttggccatcgctgacttcgacgatgcgttgggcattcgccgccaccttggggtcgtgggtcacgatgatcaccgtatgccccgccgcgtgcagctcggcgaggatgcgcatcacctccttgccgctgtgggtgtcgagggcgccggtgggctcgtcggcaaggatcacttcgccgccgttcatcaatgcccgcgcaatactcacccgctgctgctgcccgccggacagctggctgggccggtgcgtggtatgcccggccagccccagccgctcaagcaactcccgcgcgcggctgtggcgctgtgtttccggtgtgccggcgtagatcgccggcatttccacgttgtgcaaagcgctgagatgcgcgagcaagtgataacgctggaagatgaaaccgaagtagtcgcgacgcagctccgccaactgttcgtcacccagcgagcgggtctcgatgccgttgattttgtagctgccggcggtggcgtaatccaggccgccgaggatgttcatcagcgtggacttccccgagcccgaggcaccgatgatcgccaccatttccccggcatggatcgtcaaatcgatgcccttgagcgcaatgaattcgcgctcgccggccatgaagctacgggtgatgcccttgagttccaacagtggctgggtcatccgtcagctccccgccacggcgggtgtcgggtcgccgatcaccactttatcgccctcggccaagccttcgaggatctgcaccttgacgttgttattgatgcccgtcttgacctcccgcgacaccgccctgcccttggcatccagcactcgcaacgagtagctgccatcgttgttacgcgcaccgagcgccgccaccggcaccatcaaggcggcttgggcggtgtcgagcacgatacgcacctgggcggtcatggcaatgcgcaggcggtggtcggggttgggcacatcgaacagcgcgttatagaacaccgccgtgttctgcttcggggtgcctgcggtctgggtttcaaggaagttctgcggcgccggttccgtgccgcgcagcttggcgtagtagcgcttgtcggcctcgccaaggatggtgaaatacacttgctggccggggctgatatggatcacatcggcttccgagacctgggccttgacggtcatggtgtccaggtcggcaagtttgagcagcacaggcgccagttggctggcgatcacggtctggccttcctgggtgacgatgccgacgacgtcgccgtcgataggcgcgttgatacgggtgtagtccaggttgaccttggcggtgtcgatctggatgtgcgcgctcttgatctgcgcatccagcgacaacaagttggcttgctgcacctgataggtggattcggcgtcttcgaagtcctggcgcgagacggactcgtcgatctgcaggcctttgtagcgctcgtacaccgacttggcttgcttgagctgggccgccgtggcgcggcgctgggcctgcaggttttcttcatcgacctgggctttgcgcagggtgttctgcaggatcagcgggtcgatttcagcgagccactggcctttcttgaccttgtcgccgaccttgaccttcagggacttgagctggccggagacctgggcgccgacgtcgacctgtttgatgccttcgagcaggccggtggccaagacggcgttttcaatgtcaccgcgttcggcggtggccgtgaggtattggggggcgtcggcaggggcctggacggcgtagaccaccaggccgatggcgactgccaatacggtgagcattccgagtttgcgtaactttgacttttccataaatgaccgtgaagtggtgatttggggtttgatcgtgtgtatatccgttgctgcggtaacggctgatattggttccgcccttacggcgggtcacttttggaaaagagccccaaaagtaaccaaaagggctcttgccccaccactcggcacctcgcctgggctcggtgtgccctcactccggcttgaatccgtgggccgccgccatgggccatccctggcccatcgcggctaacccggcgtcctgccgggttacccacgaattcaagcctgcgtgcggccagcgtggtttaacggggcgcctagaatcaaaatcaagatcacaagcaaagccgaggcggcctggaagccgacctgttttttgaatccagcctcgatcaactgtgggagctggcttgcctgcgatggcatcaactgggtgtaactgtaagaccgaggtgcctgcatcgcaggcaagccagctcccacagaaaagcgaatccaacgcacaacacgcttttgatctggcttctgatctcaatcgccccgtaaaaccacgctggccgaacgcaggctttggagcgtgggcaacccggcaggacgccgggttagccgcgatgggccaaggatggcccatggcggcggcccacgctccaaagccggagtgagggcacaccgagccacagcgaggtgccgagtggtggggcgagagccttttggttacttttgggctcttccaaaagtgacccgctgtaagagcggaaccacaagccgccgtgaccgaagaaatggatatatacccaatcacgaaaccacctccccaacaacagccctttcaagccaccaccccgccaaccccaccacattcggcgccttcagcaacgtaaaatgattcccggcgccataccaaacctgcaaaccactcccctgcttgccccacccttcaaccatcaacccctgctcccgctgattccccgccgcatccagcgcagggtcctgtgccaacaccaaccgcaccaccccgtcaaaccgccgcgccggccggtaaaccgtgcgcaacgcagccgcgtacgtgcgcgccggcccgtccatcgcgtccaccgcagcccgccccggcaacaaccccacgccgaccatcccggcatgcaaagcctggcgctgcgacgcctcatcccaaccggcaaacgccgtcagatcaatccccagcgatttaccggccgacaactgcatcgcctcgaccaaccgcaccaacgccgctgtggttgtataaggctttgcaacaccgcccggcgactcactgtcgatcaccgtcagcgaggccacctcgcgcccggccgcctgcaaacgcaacgccatttccagcgcaacccagccgccaaacgaatgccccaccagatgcaccggcccctgcgggcactcttgcgccagcgacgccagataacattcagccgccgcttgcacctggctatggggcaccgcctcgccatccagcccgcgcggctgcaagccgaacaacggccagtcccgcccaagtgcttcgcccaggctcacaaacccggtgacgctgtctcccgcccccggcacacagaacaccggcgcgtaccccgcacggccgctctggatgcgcagcagcggttgatgcgccgcctcggcaaccggcacgctggcggccaatgcttcgttcattgcccggcccaacacttgaatatgcggcgcctgcatcatgctctggtgttcgcccggcaccacgacctgacgcaattgccccggcgccaaaacgtcagcccagcccaggctttcgctgcgccgcgacagttcggtcgggcgttccacggcgctgaacaactgcaccgcaatcggcagcgggaacaagctgtaatgcgccagcgcatgcccgtgccccacttcgcgctcgataaaactcaagaggtccgcgtccgtagcttctgccatttgcgcgtatagcagaccttgatcgcgaaggcgttgcagcaggcccgcaacgtccagctgtccaatgcctgcctccaggccttcaaggctcgccagttcattcacacctccctgtgatttccaatacgccgtgcactgcaacagcaagtgccgcttgagcgcgtccggcccgctccagcgcgctttgccctgatcggtcaggcgcggcacgtagctgtcgatcaagccgaggaacgcgaccggctcatccagccccagcagttgcagggcgacttcataggccagcacaccgccaaacgaccaccctgctacgcggtaagggccatggggctgaatctcgcgaatcaacccgaccaggcgcgccgccaggccttccatggtgttcaggtgcgcctctcccagcgcagtacccggcaggccatagatcgggtagtcgcccggcaaatgctggccgagcgccgggaagtacacgtccatgccgctgaattcgtgaaccaggaacaacggcggcagtgagccgctgctgcgtacggtaatcacagcgctgtcgcgtagcggctcgtccgtgcgctggtgcaccatcgccgccaccgaggccacgctggcgtgctggaacagctcggccagggacacctgcaaccccgcctcctccatcaggttgaccagccggatcgccagcaacgagtgcccgcccagctcaaagaaactgtcatgacgccccacctgttccagcttcaacacgcccgcccacaactgcgccagggtctgctccagcgcgcccaccggcgcttcgaaatcgcggcggtgcaaggcttccagcgcaggcactggcaaggctttgcggtcgaccttgccgttggccgtcaacggcaactgcgccagcggcacataagccgacggcagcatgtagtccggcagttggccttgcagatgggccctgacgctgtcgaggccaaccggctcgcccgcccaggtgaaataggccaccagacgcttgtcgcccggcacgtcttcacgggccagcaccaccacgtcctggataccggcaaaagccccaagccgcgcttcgatttcacccaattcaatacggaaaccgcgaaccttcacctgatcgtcgttgcgcccggtgcactccagcaagccctctgcgttccaacgcccgaggtcgccggtgcggtacatcaagtggccctcgttgaacgggtccgccacaaacttttcggcggtcagttcaggccggttcagataccccttggccacgccatcgccgccaatgcagatttcaccggtcacgcccaagggcaccggctgcaactgcgcgtccagcacatggatttgcgtgttggaaattgcccgcccgataggcacgctgtcggcgttttcggcaatcgcgtgcacttcatgggtggtggcgtaggtggtggtttccgtcggcccgtagcaatgcaccaggcgcaaggccttggcacgcgccaacaggctgcggaaggccgccgggtcggcgcgttcaccgccgcacagcaaaatgcgcaaaccggccagcgcctcaggaatcatctgcacgtactggttgaacagcgcagtggtcacgaacagtaccgtggcgccgttcaaggcggcgccgaacgctaccgggtcgagcaaagtggcgtggtcgatcacctgcacctggccgccattgagtagcgcaccccacacgtccatggtgctggcgtcgaacgccgggttggaggcaaaggccacccggtcgctggcgttgaaatcggcgtaaccgttattcagcaccagccgcgtgatgccgcgatggggcaccaatacgcctttcggcgtgccggtggagccggaggtgtacatgatgtacgccacgctgtccgacgattgcgacaggcccgggttgtgattcgggtgcgggtcaagggccagggtgtccaggtccaggcgctgcgccgggtaatcgacagtcgcgccgctgtgggtcaacagccatgccgcgccactgtcctgtaccataaagccctggcgctcggccggcgcgttgatgtccagcggcacataggctgcggcgcatttgagcacagccagttggctgaccagcaggtcgagggaacgcggcaacaggatcgccacgtggtcgccgggccttacgcccaggcccgacaggtggtgggccagccggttggcgcgggtgttcagctcgccataactcagaacctgctcaccgtgctgcgcggccgccgcatcggggcgcgcctgcgcctgggcttcaaacagacgctgcaccgtgtgctcgcgagggaacacgcgagtggtggcgttgaagcccgccagttgttgaagctcggcgggcggcagaatcggcaagtggctgacggcgatatcacggttgtgttccagcgcggccaccacctgctccagcgcgatactcaggtaatcacacacacgccgggcgccctgccccatggccttgaggctgaacccgtcacccaggtcatccacactcagcgacagcccgtagttggtgtgctcctcggccttgagcaattgaatgccgtgccatgcctcagccacttcacccgcctgcggcgcgctgtggcggtagttgaacagcacgctgaacagcggcgtattgaccgccaccgcgctgcagcgttgggccagcgccaagggcgcatgctcatggctgagcaattgggtcaggcgcgcgtgggtggcacgcagtgcatcgcgcaccgggttttcaccgaggtcgacccgcagcggcaaggtgttgataaacacccccatcgcccgttcggcgccctcgcccccttgcaggcggccaagcattacggtgccgaacaccacgtgctcgcggccgctgaccttgcccagcacctgcgcccaggccaaatgcatcaggctggcggcactcactcccgactggcgcgcctgggtccgcaggcgctggctcaggtgcggatccagcgccaatcgcgccgtttcatccgcgcccagcggtgtgacctcagtgggttcatcgatgtcaccgagcatctcgcggaagaaggtttcatggtcctcaagccccaaccgggtctgggccacgtagttgcgatacggcacagccgcgcccagcgtggcttcggtgcccgacaggtgagcctgcaactcatgctgcaggatttccagggcgatgtggtccatcaccagatggtggaacagcaacgtggcgaccacccggtgtggttcccgggtgtacaccaggcgaatcagcggcgccaggcccaggtccaggcgctgcggcaccgggccggtttccacacttaaggttgccgcacgccacaccacttgcaccggctcttccaggccgtcccaatggaacgaggaacgcaggatgtcgtggcgttgaatcaccgcctgcagcgcgtgggcaaaggcgtccaggcgccgttggctgtcgaaggcaaactgcgcctgcagcaggtactcatccggcccttgcacagcacggtgctgatagagcatgcccgcctgcaacggcgccagcgggtagatgtcctgcacgttcgctgcaccgccggggatacacgcgacaatacggtcgatggccagttggtccagctgaatcaacggcaacatgcccggcgtgatgtgcgtgcaacccgctgcaatgccattgtccggcaccgccacttcacgccccccacccagcgccgctgccaggccggccagggtcggctggccgaacagcactttcacgtctgccgacaagcccaggcggcgcatgcgccccatcaggctgaccgccagcaacgagtggccgcccagctcgaaaaagttgtcgtgccggcccacacgttccacgtccagcagctcggcccacaggctggccagggcgatttcggtatcgccctcgggcgcttcatactcacgcaccaccaccgaatccaggcccggcgcgggcagcgccttgcggtcgagcttgccgttggggctcagggggaatgcctcgaggtggacgaacacggcgggcaccatgaactccggcaggtgctgcaacaggtggctgcgcaacgtctcgatgccggtcacagcgccggtgtaataggcgagcagccggttgtcacgggcaaccaccgccgcctcgttgatcagcgggtattcggtcagccgcgcctggatctcacccagttcgatacgcaaaccacggatcttcacctgatcgtcattgcggcccaggtactcgatattgccatccggcaaataccgcccgacatcaccggtgcggtacatgcgcccctgggtgaacgggtcgtcgatgaagcgttcggcggtcagttcgggcttgttcaggtaaccccgcgccacttgcacacccgcgataaacagttcacccaccacccccagcggcacgggctgcaactgcgcatccagcaggtacatgcgcgtgttcgcgatgggcttgccgataggcgtgttgtctggcgttaccgggcccgcgcagttccatgcggtcacgtccacggcggcttcggtcgggccgtagaggttatgcaattcgctgcccggcaattgccgcttgaagcgccgcaccaccgcgcccggcaaggcttcgccgctgcacatcacacgcaccaggccagccgcctggctcacatcgccatgggccaggaatacatcgagcatcgacggcacaaagtgcagcgtggtgatctgttcggcttcgatgatgtcgcacagataggccgggtctttatggccgcccgggcgtgccatcaccaaacgtgcgcccgtgaacagcggccagaagaactcccacaccgacacgtcgaaactgaacggggttttctgcaacacgctgtcgtgggcagtgagcgcgtattcgtcctgcatccacagcaggcggttgaccaccccggcatgctcgttgatcacgcctttgggctggccggtggagccggaggtgtagatcacataagcgctgacgccctgtacccctgggttatcgacgggctggtgttgccacacaggaaggtccagatcgatcagcggcaccttgccgagcaaaccacgggtttcgccttgcgccagtaccacctgcggcgcgctgtcttcaagcatgtaggcgatgcgctccggcgggtacgccgggtccagcggcacgtaggcggcgccggccttgaggatcgcgtacaggccgatgaccatttccaggccgcgttccacgcagatcgccacgcggtcatcggcctgcacccccagttccagcaagtggtgggcgagctgattggcccgcgcattcagttcggcgtaagtcagttgcgcctcgcccactttcaccgccattgcgtgcggcgtgcgcactacctgatcttcgaacagcccatgcaaggtctggtcgaggttgtaacccacctgcgtggcgttgaagttgaacagcaggtgctgacgttcgcgctcgtccatcagcggcgcatgctccagcaccgcctggtcgttatcgaccatggcctgcaacacgcgggtgaagtaaccggcgtaacgccgcaccgtcgcctcgtcaaacagcgccaccgcgtactccagcgcgccgagaatgctgccctgcacctcgcccaggtccagggacaggtcgaacttggcaaagtggctgttctccacaatgccttccagcgccaggtcgcccaacgccagggtcggcgcgctgctgtcctgccaggtcagcagggtctggaataccgggctgtgggccaggctgcgcaagggccgggtgatttccaccacttgctcgaacggcaggtcctggtggctctgggcggccagcgtctgggccttgacccgcgccagcaaggcctcggtgctcagctcgccggaggtgtcgatccgcaccgccagcgtgttgacaaacaggccgatcagcccctccacttcactgcgggtacggttggccaccggcgagccgatcaccagctcctgctgcccggatagccgcgccagcaaggaagcccaggcgctcatcaaggtcacgtacaacgtggtgccatggcgttggctcaaggccttgagcccggcagtaaggcgttcatccaggcgtacgtcgacgctgctgccggcgtagtcttgctgcgccgggcgcgggcggtcggtgggcaaggtcagcaaggccggcgcaccgtccagggcctgctgccaaaaactgctctggcgttgcagcacctcaccgctcagccacaggcgttgccacacggcaaagtcaccgtactggatcggcaacggcggcagcggatccggcaggccgtggctgaaggcttggtacagcgccatcaactcacgggtgagcacccccatggaccaaccgtcggaaacgatatggtgcaaggtcagcagcagcacatggtgatcgtcggccatcaccaccaggcgcccgcgcagcagcgggccgcgctccaggtcgaaaggcgccgaaccctcgccatggatcaacgcgtccagcgcctgctggggttgcgggtggcggcgcaggtcctgcacttgcaaaggcaacacctcttcggcaggcacgatcagtacctgggcttcgtcgcccctctgggcaaaccggctgcgcagggtttcatgccgcgccacgatccgcgccagcgcccgttgcaaggcctcgacatgcaactgcccacgcaagcgcaagccaatcggaatgttgtaggcggtgttggcgccctccatcaacgccagaaaccacaggcgctgctgggcgaaggacaacggcacgtcttcatcgcggttggccggcagaatatccggcaccgtgctgcgcccagcctgggccagcacctgggccaccgctgccagcgccgggttggcaaacaagtcgccgagcaacagttccacgcccaggcgctggcggacctgcgacaccatgcgcatcgccagcagcgaatgcccgcccagttcgaagaagtggtcctgacggcctacgcgctcgacctgcagcacatcggcccagatctgcgccaacaggctttcgatctcgccttggggtgtttcgtactcgcgcgtaaacagggcggccatgtccggtgccggcaaggccttgcggtcgagtttgccgttggccgtcaacggcaacgcgtcgagttttacgaaggctaccggcaccatgtagtccggcaggtgcgccaccagatgggcgcggatgtcgccgacggtcagcgcatccagctgcgggtgctcggtgaaatacgccaccagccgctcttcgcgcaccagcaccaccgtttcttgaatgcccggcaatccgttgagccgggtctcgatttcacccagctcgatgcgcatgccacggattttcacctggtcatcgttacggcccaggtattcgagagtgccgtccggcagccagcgcgccaggtcgccggtgcggtacatgcgcccgccgttgaacgggtcgtgcagaaagcgttcggcggtcagttccgggcggttcaggtaaccacgcgccacgcccttgccgcccacgtacaactcacccgccacgcccagcggaaccggccgctgtgtttcatccagcaggtacaccgtggcgttggccacgggtttgccgatgtgcagcaacccgcctgcctcgaccttgccggacgtggcgaccaccgtggcttcggtgggcccgtagttgttgatcagttcaaaccgctgggcccgcgcaaaatggcgcaggcgatcgccgccgatcagcagggtgcgcagcgtcgggtgttcgatctgctggctgaaggcgtactcggccactggcgtcggcaggaagcacacgtccaacggctgcgcgcaccaccaggcgagcagcgcatccacgtcttcggcgccctccgccgcgggcggcaggtgcaaggtcgcgccgacgcacagcgccggccacacttcccaggccatcgcatcaaagccgaacccggccacgctggccgtgtggcgcccggcacgcaagtcaaaggcgtggcagtgccagtccaccaggttcgccacggtgtggtgctccaccatcacgcctttgggcaggccggtggagcccgaggtgtaaatcacgtaggccaggttggacggtgtgaccgccaccatggggttgcttgccgagtggtgctgccaggtgaagcggtcgaggtcgatcaccggcacatcaagggccggcaagcgttcacgcaacgcctgttgggtcagcaccgccacgggggcactgtcggtcagcaggtaattcaagcgctcggccgggtgcgaggggtccaccggcacgtagcacgcccccgccttgaggatcgccagcaacccggccagggtgtccaggccacggcgcgcgacaatggccacgcggtcgtcgggtttgacccccaacgccagcaggtgatgggccaccaggttggcttgcgcattcagctcggcgtaggtcagctggcgcccctggtacaccgcagcgatagcgctcggcgtgagcgcggcctgggcttcgatgcggccgtgcagcgtggtgccctgggggaaatccgcctgggttgcgttgaactggtccagcagcaattgctgctcggcaaccggcaccaccgacacctggtccagcgccgtcagcggggcttgttccagcgcgctcaccaggttttccagggcggtttgcaggtaggcgcagacgcggtgcgggtccacctgggtgctggccagtaaactcaggccaaagccttcacccaggtcgtcgacactcaaggtcagcgggtagttggtacgttcctcggcgcgcagggcggtgatcccgtcccaggccgacacggcttcggcactcgccgccggggcactgtggcggtaattgagcaaggcgctgaacagcggcgtcggcgcgaccaccccgctgcaacgctgggccaacgccagcgctgcatgctcgtggcgcagcaaggtggtcagccgcgcatgggtggccttgaccccggcacgcacgtcctggccgtccacatccacgcgaaacggcaaggtgttgatgaagatgcccagcgcccggtccgtgtcatggctgccttgcaggcggcccatcaatacggtaccgaacaccacctgccgcttgcccgccagagcccccaacacttgcgcccagcccatgtggaacaagctggcgacgctcacgcccagttgccgcgcctgggtgcgcaagcgctggcccagctgcgcggcgagcggcaggctgacttcggcaatgccacgcgcatcgccctgcacgtcctgcagaccgaacggcagggtcggctcgctgatatcgccgagcatctggcggaagaagctttcatgttccgcctcgctgatgcccagccgtgcgtgcgccacgtagttgcgaaacggtaccgcctggcccagcgccgcgccctgccccagcaggcacgcctgcatctcgtggcacaccacttccagggcgctgtggtcgagggccatgtggtggaacagcagggtcgcaacgatgcgttggtggctcgggtctgcggcatgcaccaggcgcagcaacggcgcctgggtcacatccagccggtagtggcgcgcgtcgaacagcgcgtgcagctgggcggcgatatcaccgtcggccgggtccaatggcagcgcttgcacgggcaaacgtgccgtgcgccacaccacttgcgagggttcctgcaaaccgtcccagaccacgccggtgcgcaggatatcgtgacggtccatcacggtttgcaaggcttgggcaaacgcctcgaaacgctccaggctgtcgaaggcgaactgcgactgcatcacgtacgggtcgccctgcccggcgctgacgtggtggaacaggatgccttcctgcaagggcgccagcgggtagatgtcctgaatgttggccacaccgccctcgacagtggcgacgatgcggtcgatctcgtcctcgctcaggctcgacagggtcaacatcgccggggtgatgcgctcggtgcccgccgggatgccattggccggcacctcgacttcaccggccttggtcgccgagtattcaccggctttgatcagctcgatcaacgccggtttgtgctcgcgcaatgccgcgagaatcgcagggtcgctcaaggcgtgtttgttgccttgcaccgacagctgatcacccttgagtgcgagctgcacgtccttggttttcagcgtcgccagcagttcgaggatgctcacaggacgatctccattcgttcggtcattgcggcgtagccggccagggtcggctgttcgaacagcgcccgtacatcggcctccatgccttcctggcgcaagcgcccgatcaagctcacggcgagcaacgaatgcccgcccagttcaaagaagttgtcatggcgccctacccgctccaccttgagcaactcggcccagagttgggcgaggagaatttcggtgtcgccttcaggtgccacgtactcacgcacgttcagcgcttcggcccccggtgccggcaaggctttgcggtccagcttgccgttggggctcaggggcaacgcatcaaggtgtacgaacagcgcgggcaccataaagtccggcaggtgctgcaacagctgggcgcgcaggctttcgatctcggtgtgcacgccggtgtagtaggcgatcagccggtcttcgcgggcgacaaccgccgcttcattgacgtgcggatgctccagcaaccgcgcctggatctcgcccagttcgatgcgcaggccacggatcttcacctggtcatcgttgcggcccaggtattcgatattgccgtcgggcaagtagcggcccacgtcaccggtgcggtacatccggcctttggtgaacgggtccttgaggaagcgctcggcggtcagttcaggccggttcaggtagccgcgcgccacttgcacgccgccgataaacaactcgccgaccacccccagcgggaccggctgcaactgggcgtcgagcaggtacatgcgcgtgttggcgatgggtttgccgatcggcgtgttgtcgggcacgtcggggcgcgcgcagttccacgcggtcacgtccaccgccgcttcggtcgggccgtacaggttgtacaggccaatgcccggcaattgcgttttgaagcgccgcaccaggcttcccggcagcgcttcaccgctgcacatcacccgcaccagcccggccgcctggctgacatcgccgtgggcgaggaacacgtcgagcatcgacggcacaaagtgcagcgtggtgatctgttcggcctggatgatgtcgcacaggtacgccgggtctttgtggccgcccgggcgcgccatcaccaggcgtgcgccggtgaacagcggccagaagaactcccacaccgacacgtcgaagctgaacggggttttctgcagcacgctgtcatgggccttgaggccgtaggcgtcctgcatccacagcaggcggttgaccacaccggcgtgttcgttgatcacgcccttgggctggccggtggaaccggaggtgtagatcacataggcctgatgttgcgcggtaaggcccgcgacctgcgggttgctcgcgggctgctggtgccaggtgctgtggtcgaggtcgaccaccggcacatcgcccagcaacgcgcgggtagcgccttgggccagcaccaccaccggtgcgctgtcttgcagcatgtaggcgatacggtcctgcggataagccgggtccagcggcacgtaaccgccaccggccttgaggatggcgaacaggccgaccaccatgtccaggccccgttcgacgcaaatccccacccgcgcatccggtgctacgccaagctcgcgcaagtggtgggccaggcggttggcgcgcgcgttgagttcgctgtaagtcagttgctgatcgccggctttgacggccaccgcctgcggcgtgcgttcaacctgggcttcgaacatcccgtgcagggtctggtcgaggttgtaattcacgtcggtggcgttgaattcgaccagcagttgttgccgttcctcggcgccaaggattgccaggcggttgagtgcctggtcgggcgcctgttccagcgcgtcgaccaacccggccaacgccgtttgcaggtagccacacacccgttgtgcatcgacttgcgccagcgcggtcacgtcataaccgtcacccaaatcatccacgttcaaggtcagcgggtagttggtgcgcccgtcattgaccagcgtctgcatgccttcccacgcctgctctgcgtcggcggaacgggtggcggcgccgcgatggcgataattgagcatcgaactgaacagcggcgccggtgccgctacgccgctgcagcgctgggccagcgccagggacgcgtgttcatgccccagcaacgcggtgagccgagcgtgggtggcacgcacggccgcacgcactccttgtgcatcgatatccaggcgcagcggcaaggtgttgataaacaccccgagcgcgcggtcagcgccctcgccgccttgcaagcgaccgaccagtaccgtgccgaacaccacactgtgccgcccggccgttgccgccagcacctggccccaggccaggtggaacaggctggccgtgctcacgcccaacagccgggcctgggcccgcaggcggcggttcaggtcagcgtcgaggtgcacggtatgttcgccaatggcactgccgtcgccgcgcacatcctgcaggccgaatggcaaggtcggctcgtcgacatcgccgagcatgtcgcggaagaacgcttcatgttctgcctcgctgacgcccaaacgggcctgggccacatagttgcggtacggcatcggcgcggcagtcggtgccgcgtggccgagcaaatggccctgcatttcacgcagcaccacgtcgaaagcggtgtggtcgagcacgatgtggtgatacagcaacaccaccacgacgcgcgcgttggccgggtctttcgcgtacatcaggcggatcagcggcgcctggctaatgtccaggcgatagcgccgcgcatcaaaacgctcatgcagggccgcgagtacatcgccttccagctgcagttcctgcacgctcaactcggctttgcgccgcaccacttgcaacggttgcgcgaggccttcccagaccacaccggtgcgcaggatgtcgtggcggttgatcacctgttgcagcgcctgggcgaacgcgttcaaacgctcgaggctgtcaaacgccaagtgtgattgcagcaggtagggatcgccctgctcggcggtgatgtagtggtaaagaatgccttcctgcaacggcgccagcgggtagatgtcctgcacgttggccgcgccgccgggcacaccggcgaccacttggtcgagggtggattgatcgaggttgaccaggggcaacaggtccggggtgatgcgctggcagtcggcaccgatgcggttggccggcacctgcacttcacggccactgcccacggcggccgccagcgcggccagggtcggctggctgaacagcacgcgcacatcggcgctgaggccgacctggcgcatgcgttcgatcaggctgacggcgagcaacgaatggccgccgagttcgaagaagtggtcatgacgaccgacttgccggacctgcaacacctcggcccagatacccgccagcgtggtttcgacgtcaccttgcggcgcctcgtagtcgcggctgagcagcgcgctttgatccggttcaggcagggccttgcggtccagcttgccattggcagtcagcggcagtacgtcgagccgcacgtaggcggccggtaccagcgcggcgggcaattgcgcctgcaattgggcacgcagggtttcaatggccagcgggtagcgttcagtgaaccaggcgaccagacggccatcgcgcaccaacaccaccgcttcggcaacaccgtcgagcaccgccaggcggctttcgatctcgcccagctcgacacgtacgccgcgcaccttgacctggtcatcattacgccccaggtactcgatattgccgtcaggcagccagcgcgccaggtcgccggtgcggtacatgcgccccgggttgaacgggtcttgcaggaagcgttcggcggtcatctcggggcggttcaaatacccccgcgccacaccgctgccagccacgtacaactcgcccgcgacgcccaccggcaccgggcgcagctgttcatccagcacgtagacgctggcattggcgaccggccggccgatatgcagcgcttgcccggcccgcacgcggccggaggtggcgaccaccgtggcttcggtggggccgtagttgttgatgacggcgaagcgccgctcctgggtgaactgacgcaggcgatcgccgccgatcagcagaatgcgcaagcttgggtgcgccaggtgctggctgaacgcgtactcggccaccggcgtgggcaggaagctcacgtccagcggctgtgcgagccaccaagcgagcagttcgtcgatgttttcattgcccactgtggcaggcggcaagtgcagggtggcgcccacacacagggccggccagacctcccaggccatggcgtcaaaaccgaaaccggcgacgctgctggtgtggctgcgcgcatccaggccgaaggtttcgcagtgccagtgcaccaggttttccacggtgcggtgctccaccatcacgcccttgggctggccggtggagccggaggtgtagatcacgtaggccaggtgcgccggggtcaagtgagcaagatggggattgctgacgggctgatgctgcaagcccggttcaaacaggtcgatgctgacgacaccgcccaacaagtcgcgggtacccgcttcggtcaataccgccaccggtgcgctgtcctgcaacagataggcaatccgttcggcggggtacgccgggtcgacgggcacataaccggcaccggctttgagaatacccagcaaccccaccaacatctgcgggccgcggcggcagcacagggcgacgcggtcgtccggctgcacgccgagtgccagcagatgatgggcgagctgattggcacgttggttgagttgctgataggtcagcgacgcgtcgccttgcgtcacggctatggcgtggggctggcgttcggcctggacttcaaacgcgccgtgcacggtctggccgaccgggaaatccgccgccgtcgcgttgaagtcgcgcagcaggatgtcgcgctctgcggtcggcacaataggcagggtgttcagtgcggtgttcgccgcgctttctagcgcgccgacaagctgttcaaccgcgctgctcatgtacccgcacaagcgctgcgcaccgatctgcggcaacgccagcacggtcaggccaaaatccgtgcccaggtcatcgacgctgagggtcagcgggtagttgctgcgctcttcgccacccagcagttgcactccctcccagataccatggccctcgcgggccatttcgccgggcgtggtgtgacggtagttgagcaaggcactgaacagcggcactgaggtcgcgacaccgctgcaacgttgggccagagccaaagaagcgtgttcatgcccgagcaaggcgctcaagcgcgcatgggtcgtcttgaccgccacggcagcgctcgctgccacgttcacgcgcagcggcaaggtgttgatgaacatgcccaacgcgcggtcggcgccatcgccggcctgcatacggcccatcaacacagtgccaaacaccacgtcatcgcgcccggccaccagccccagcacctgcgcccacgccaggtgcatcaggcttgccgcgctgacgcccagcacacgcgcctgttcacgcacgcgcagcgccaaagcggcgtccaatggcagttcggcttcttcaatatcgcgcccatcgccctgcacatcctgaaggccaaacggcaaggtaggctcatccactggcgccagcatctcgcggaagaattgttcatgctccgccacactgacacccaggcgcgcctgggctacgtaattgcgaaacggtgccgcttcgggcaacgcacctgcctgattgaacaggaaggcgcgcatttcctggccgaccacttccatggcggtatggtccagcgccaggtggtggaacagcaggatggctgcgacgcggtgattgaccgggtcttgcgcgtaaaccaggcgcagcagcggcgcccgagtgatgtccaggcggtaatgacgggcatcaaaacgcgcgtgcaactgctcgatgattccgccgtctgccgcgtccagcacgacttcctgtaccaccaactgtgcctcgcgccagaccacttgcaccgggctgtccaggccttcccagacgacgcccgtgcgcaggatgtcgtgacgcgcgaccacctgttgcaacgcgcccatgaacgcatgcaagcgctcgaggctgtcgaacgccatgcgcgattgcagcaaatacgggtcgccctgctcggcgctgatgtggtgatacagaatgccttcctgcaacggcgccagcgggtaaatatcctgcacattcgccgcgccgcccggcaccgtggcgacgatgcgctcgatggccgtttggtcgagttgcaccagggtcagcatcgacggcgtgatccgcgtgcaaccggcgggaatgccattggccggcaccacgatttcgcggccactgcccacggccgctgccaatgccgccaggcttggctggctgaacagcacgcgcacgtcggtgctgaggccgacctgacgcatgcgttcgatcaggctgacggccaacagcgaatgcccgcccaattcaaagaaatggtcgtggcggcccacgcgttcaagcttgagcacgtcctgccagatctgcgccagcagggtttccacctcgccttcgggcgcctcgtagccacggctgagcagcgcgctctggtccggcaccggcaggcctttgcggtcaagcttaccgttggcggtgagcggcatcagttccagccacacataggccgacggcaccatgtaatccggcaaccggccttgcagatgggcgcgcagggcttcgatgtccagcggcgcatccgcggtgtaataggcgaccaggcgtttgtcgccgggctcgtcttcgcggaccagcaccaccgcgtctttcacgcccgcgaaggccgccaggcaggtttcgatttcgccgggttcgatacggaaaccgcgaatcttcacctgcaagtcattgcgcccctggtacagcaatgtgccgtcggcttgccaactggccaagtcgccgctgcggtagagcacgccgtcgccgaaggggttggggatgaatttttcagcggtcagttgcggctggttcaaatagcctttggcgacgcctgcgccgccgatgtacagctcgccgatgatgcccagcggcaccggttgccggcgggcatccagcacatagacctggccattgccgatggggcggccaatcgggatagcacccccgtctgccgtggtgatttcaaaggtggtcgagaacgtcgtggcttcggtcgggccgtagccgttcaacaggtgcaaaggtttgccctgcttgagcacgcggccgatgaccagtgggtcgaggacatcaccgccgacgatcaggtagcgcaactggcggaacaccggcagcaacgcatcggagtattgatggaacagcccggcggtcatccacaacacactgacggcctgctcctgcaacaacgaggcaaacgcagcctgggacagcagcaccgcatgctcgaccaccaccacgcaaccgccattgagcaacggtgcccacacgtcgagggtgctggcgtcaaaggccgggttggaggcgaacgccacacggtcgcgctcattgaaatcggcataaccgttgttcagcaccagccgcgagatcgcgcggtgcggcacttgcacgcctttgggggcgccggtggagccggaggtgtacatgatgtacgccacgtcgtccgaggcgtgcaccaggtccgggttgcgcggtgacagtgcgtccaggttgaggtcggccagggtgttgagcacgcgatgggcgccgctgtcctgcaccatgaaggcctggcgttccaccggggcattgatgtccagcggtacatagacggcggcgcacttgaggatcgccagctggcacaccagtaaatccaaagagcgtggcagcgcaatggccacgctttcgcccggctgcacgccttggttgatcaggtgatgggccaggcggttggcgcggcggttgaggtcgcggtaactcagcgacagctggccatgcaccgcggccaccgcctcgggacgtgccagcgcctgggcttcgaacacctgatgcacgcagaggtgtgaggggtactcacgggccgtgtcgttgaacgccaccagcacttggttgcgctcggcgggcggcaggatcgacacggattgcaacggcgtggtgggcgcttgttgcagcgcagtcaccagatgccgcaacgccgtgagcaggtagtcgcccacgcgctgcacgttcaattcggccacgccctgcacggtgagggcaaagcctgtgcccaggtcatcgacgttgagcaccagcgggtaattgctgcgttcttcggagctgagaatctcgatgcccgatgccgcgaacgggctgtcgcccggtgcttcgcccggcgcgctgtggcggtagttgagcagcgtgctgaacagcggcagcgaacccggtacgccgctgcaacgttgggccagcgacagcgaagcgtgctcatgcccgagcaattgcgcaaggcgcgcatgggtagcgcgcacccccgcctgaacgcccgtggcaccgaggctgacccgcagcggcaaggtgttgatgaacatccccagcgcacggtcggcgccctcgccgccctgcaggcggcccagcagtacggtgccgaacaccacgtcttgctggccggacacctggcccaacacctgcgcccaggccaggtgcaccaggctggcggtgctcacgcccagttgccgagcctgttcgcgcaggccctggctgagtgccggttccagcggcaggtgggcttcgacgatgccgctgccgtcgccattcacgtcctgcaaaccgaaggccagggtcggctcgtcgatatcgccgagcatctcgctgaaaaacgcttcgtgctgtgcctggctcaccccgaggcgcgcctgggctacgtagttgcggtactgcaccgcctcaggcaattgcgcgctgttgccggacaggctggcgcccatttcttccaccagcacttgcagcgcggtgtggtcgagcaagatgtggtgcaacagcagaatgccgacatggcggccctgttcctcggcgtacgccaaacgcatcagcgaagcccgggacagatcgaggcgatagtggcgtgggtcgaagcgctgctgcagttgcgccagggcaccagcgcccgtggcgtcgatacgttccaccgccagcggcgcctggcgcaggaccacttgcaccggctcctccaggccttcccaaaggatggcggtgcgcaggatgtcgttgcgctcgatcacgctgtgcagcgcgtggacaaaggcgtccaccgccgcttgatcggcgaagctgaactgcacctgcaacacgtaggggtcgccttcggttgttgccaggtggtgataaagaatgcccgcctgtaatggtgccaggccgtagatgtcctgcacattggcaatgccgccgggcacggtttgcaggatgtggtcgatggccgcctggtccagatcgaccagcggcaacatgtctggggtaatggtttggctgccgggctggatgagattttgcggaacctgcacctcctgctgcccacccaccgcagccgccagcgcggcgagcgtgggttggccgaacagcacgcgcacgtcggcactgaggtccacttggcgcatgcgttcgatcagcttgaccgccagcagcgagtggccgcccagttcgaagaaattgtcgtcacgccccacctggtcgagcttgagcaggtcttgccagatctgggcaatggcgctttccaccgcaccttgcggggctgcgtagccgcgccgcaccagggcatcggcgtccggcgcaggcaaggccttgcggtcgagcttgccgttggtggtcagcgggaatgacgccagcatgacaaaggcgctcggcaccatgtagtcggccaggctcagcagcaggtgatcgcgcagttcggcagcgttgagttcacgcccggcaatcacataggccaccagacgcttgtcgcccggttgatcttcacgggcgataaccacggcgtcacgcacgccgtcggcgccggccaggcgcgcttcgatttcgcccagttcgatacggaaaccacgaatcttgacctggtcgtcattgcgccccaggtactcgacgctgccgtcggccagcaagcggccgaggtcgccggtcttgtacatgcgcaggcccgtggccgggtcggccaggaagcgttcggcgttcaattcgtcgcggttcaggtaaccgcgcgccacaccggcaccgcccacgtacagctcgccgaccacgccaaacggcaggggctcgcggcgctcgtccagcacgtagagttgcaggtcggggatgcgcacgccgatggggcttacgcccaccaactgcgcatcggccgcttccagcgcgcgataggttacgtgcacggtggtttcggtgatgccgtacatgttcaccagttgcgtaccggcgttgatcgcgcgggcgtaccacggcttgagcatgcccggttccagggcctcgccaccgaaaatcacctggcgcaaggaatgcgcttgcgcgctctgggcctgggcggcgatcagttggcggaaggcgctgggcgtctggttgagaatgctcaccccggcctcgcagagcagcgtatagcacgcctcgggcgagcggctgaccagttgcggcacgatcagcaactggccgccgtgcatcagcgcgccccagatttcccagaccgagaagtcgaaggcaaacgagtgaaacagcgcccacacgtcgttgctgttgaagccaaaccaatgctcggtggccgtgaacaggcgcgcgacttggcggtgctcgatcatcacgcctttgggcaagccggtggagcctgaggtgtagatcacataggccaggttcgccgggctcaggtgcagccttgggttgacgatggattcatcgcgcaggctgttgaggtcgatctgcggcaagtcaccgaccaaatggcgagtgttggcttgcaccagtaccgccaacggtgcgctgtcagtcagggtgtaggcgatgcgttccagcgggtacgccgggtcaatcggcacatagcctgcgccggctttcaaaatgcccagcaggccaatgatcatctctgggccacgctcgacacagatcgccacacggtcatcggggcgcacgccctgggcgagcaaacggtgggcaacctggttggcgcgctcgttgagctggcggtaggtcacgcgcttgttatcgaagcgcagggcgatggcatcggggtgggcggcggcgcgggtttcgacttgctggtggatcagcgcggtgtcgtcgtagtgcgtggggctttggttgaggcggtgcagcaggtgatgacgttcgtcttcgggcaggatgttcaggccgctgagcggcgtatccggtcgctgctccagcgcatccgccaggctgtccagtgccgtgtgcaggtagccggcgacccgttgcgcgccgatggcggcgtcgaccatcacggtcaggacgaaatcttcgccgaggtcatcgacgttgaccgtcagcgggtagttggtgcgctcctcggcgcccagcacctggatgccttcggccacctcgatcacggcgctcatgtcggcagcggcgctgtggcgatagttgagcatcgcgctgaacaacggcgtcggcgcggccacgccactgcaacgctgggccagcgccagggacgcgtgttcgtggttgagcaacgtcgtcaagcgttcatgggtggccttgaccccggcgcgcacgccctgcccgcccacatccacccgcagcggcaaggtgttgatgaacatgcccaaggcccgctcaccgccctcacccgcactcatgcggccgagcatcacggtgccgaacaccacggcctcgcggcaggacaccacccccaacacacgggccaggcccaggtgcatcatgctcgccacgctcacacccagtggccgcgcgaggttgcgcaggcgacggctcagtgcgctgtcgacgggcatgcgtacttcatcaatgccctggccatcgccctgcacgtcctgcaggccgaacggcaaggtcggctcgtcgatatccgcgagcatgtcgcgaaagaaggtttcatgggcctgttcgctgacaccgtggcgcacctgggcgatgtagctgcgaaacgcgaccggctcacccgcctcggcttgccgcccggcgaggtacagctggatttcatggcgcaccacgtcaagggcggtgtggtcgaggatggtgtggtggaacagtagcatcgccaccacacgaccgtgggccgggtcatctgcgaacaccaggcgcaacagcggcgcctggcccaggtccatgcggtagctgcgtgcatcgtagcgggcgagcagttgagcgagtacgtcgccaccgttcagatgcgcttcttcgcaggccagagttgccttgcgccacaccacttgcagcggctcgtcgaggcgctcccaggccatggacgtgcgcaggatgtcgtggcggtcgatcacccattgcagcgcctcggcaaatgcatcaaggcgtgcgcggctgtcgaacacgaactgcgcgtgcagcacgtaggggtcgccctgctcggctgacaggtggtggtagagcatgccctcctggagcggtgccagggggtagatgtcttgcacattcgcggcgccgccagggatggcggcgacaatgcgatcgatggcgggttggtcgaggtcgaccagcggcagcatttgcggggtgatgcggtaggccgggctcagccagtcaccgccgtgttcggcgacgagctccagcagccggggtttgtgggtgatcagttgatcccacagcgcgtcgtccagcgcttcgtccagcgcttcgtcatcgccgaggatgatcaggtcgccttcttcccgttgcagacggatcgcgtgggtggaaatcgctgccaataattcgctgaactgcatgggggtaacctgcctggtaagtcacggttgaggagaaaatccgttttcagctgccgcttggatcggggtttgctgggcgccctgtgaaaaatgcgggcgcagccgggggcctggaggggcttccggcaggagtgggaaattaagggattttttgggaggggggtgacatgggaagcggggacaggctggggctttggatggttcagtttttttgggtgtatatccgttatttgggtggtggcttggattggttccgcccttacggcgggtcacttttgaaaagagcccaaaagtaaccaaaaggctcttgccccaacactcggcacctcgctcacgctcggtgtacccgtaatccgacattgatttggggggcctcagatcaagatcaaaagcaaaagcacggcggcctgacagccggcctgagtggtgtggagcaaaagcacggtccagtgtgggagctggcttgtcggatcgccgcaccgctgcgatggcatcaccgcggtatgtctgatgtaccgaggtgtctgcatcgcaggcaagccagctcccacagagaagcagatctatgcagttattgaagtcttactcggtcagaaatgtgggagcgggcttgctcgcgaatgcagtgtgtcagccaattaatctatcaactgacacaccgttttcgcgagcaagcccgctcccacatttggatctccatacattttggatctccattttgtctgggggagcgcggactgccctggcaaaaacagcgcttttgattcaaccactcaggccggctgtcaggccgccgtgctcttgcttttgatcttgatctcaggcgccccgttaaaccacgctggccgcacgcaggcttgaagccgtgggtaacccggcaggacgccgggttacccacggattcaagccggagtgcgggcacaccgagcctaggcgaggtgccgagtggtggggcaagagccctttggttactttgggctgggccggcattccggcttttccaaagtgacccgccgtaagggcggaaccaatagccgccgttacccaaacaacggatatacacgcagaccaagcctacaaccccaccaaccccaaatgctcccgcaaagtccccccctcataagccgtacgaaacaaccccttacgctgcaaatgcggaatcacactctcaacaaactccgtaaacgaccccggcaaataccccggcgaaatcacaaacccatcacacccgcctttctcgaacaattcagccaactgatccgccacctgcgcgccggtcccgaccaattgcggcacccgcacactgctggcaaaaatccgccccaattgttccagggtaaggtccgccccctgcatcaggagtttttctgcagccgccccatgcaccagcggcgaccgtgccacctcggccaacgtcgccgataacgcaaacgaagacaaatccacgttcaactgcgacgccaacgtcaccagccccaactcaggccgcgccaacgcgttgtgcttgtcacgcttggcccgcgcctcggcctcgctgccaccaataaacggcatcaccgccgtcaacaccttgcaactgtccgcctcgcggccttgctgcaccacctgcgcgcgcacgtcatcacgaaacgcgcgcatcgccgccaaatgcgggtgaatggtaaaaatcgcctccgcccaacgcgccccaaaacgccgcccacgcccggaggagccggcctgaatcaacaccggccgcccctgaggcgtgcgcggaatattcagcgggccttccaccttgaaccagtcgccctgatgctgcaccgactgaattaacgccgggtccgccagcacgccgctttcgcgatccagtttgagcgcatccttgccccagctgttccagagtttcagcgcgacctcgacaaactcatcggcgcggtcataacgcaggtcgtgctccaggtgtttgtccttgccgaacaggcgcccttcgctgtcgttcatcgaggtcacgatattccacgccgcacggccctttgagaggtgatcaagggtggcaaattcacgggcaatatgcgccggttcgtaataggtggtggaacgcgttgcgccaagccccagtttgctggtctggccgatcagataggacagaatcggcagcggatccaggcgcgtcgcatcctgcgcgccgtaacgcagcgcaaactcgcgggaaccgcccatctggtcgcccaccgccaggcgatcggcgaaaaacaggaagtcgaacagcccctcctccaccaccttggcgatgcgtgcgtagtactgcgggtcaaggtaattgccgacggtttccgggtggcgccataccgcatggctgtggaccacagggccgctcagcagaaacgccgataaatggatttggcggcttgtcgtcatggaaggccttatcgaagaatggagacttagccgcaaaagttatagtaggaagcaaccactatgaaagaaacctatacttctatggttatgcccgatcactcgagagactgaaaaagtaccttaagctcagatcgaaagagtatttatcgaatgctttttagaaccttatgcttggaaacttttcatcgaaaatcgagcgcgccatgccccttcgccgtcccttcgctgttgtcctcggtttgctggccttttccgtcgctgcgtgtgtggaggctcaagaaaccgtgcgcattggttaccagaaatcctcgacgctgatcacgttgctgaaaacccagggcaccctggaaaaagccctgaaggcggacaatatcgacgtgtcctggcacgagttccccagcggcctgccgctgctggaagcgctgaacatcggcaacgtcgacatcagcgccgacgtggccgacaccgtgccgatcttcgcccaggccgcccaagccaaactcacctacttcgcccaggaagcgccctcgccttcggcccaggccatcgtggtacgcaaggactcgccgatccagcaactggcggatttgaagggtaaaaaaattgcagtcacgaaagccgccggcacccactatttattgatcgccgcactggccaaggcaggcctggcgttttcggatatcgagccggcttacctgtcgccggctgacggtcgcgcagcgttcgagaacaacaaggtggatgcctgggtcacctgggaacccttcctcaccagcgtgcagcgtcaactgccaacccgcacgttggccgacggcgccgggctggccagctacaagcgctactatttgacgggtacgccttacgccaaagcccaccccgaggtcttgaagcttgtgtacgcgcagttggaacaggctggcacatgggtgaaaacccacccacaggacgccgccaaagtgctcggcccgttgtggggcaacctggatgccgccaccgtcgaagcggccaacgcgcaccgcagctatcgggtgcagccagtgacgatcgatcagttgggggaacagcaaaagatcgctgatgcgttcttcaaggccgggctgttgcccaaggctgtggacgccaaggatgtgcagacctgggcaccgtgagaagtttcatttggcaacccaagcgggttgccgcataaagggcattcccctcgtctcttaacaggccttcgtccatgattttcgccatccatgccctgtataaatccggcatcaccgagcagcgcgcggcactgctgtccagccaccgtgaatacctcggcaccgtggccgagcgcatcgcgtttgcggggccgttgttgggggcggccggtgaaccggtagggtcattgatggtggtggactttgatgacgaggcccatgtgcaggcgtggctggcgcaagagccgtttacccaggctgggctatttgcgcagttggacgtgcaactgtttcagaaccgctgggtgcagaagaccgggtttccagcggtgtaattgagaggccggcgcgagggatcaggaaaagctggagggttggcatctgcaaacctaatcagcccaaaaatggctcaaaacggccctttcgttatcacccgctcatcaataaacctgcgcaacatcccgatccgttgcgtataggcatcgctcaaacagctcaggttcgaaccgcaggcatggcgctttttgagccattcggcctgcccgtccatcaatgaaccccgcccgcccatggccatgaaatgcttgttcaggtcgtagagcagcgccatggtcacgtcctggtcattgaggctgacgttctggcagatggcaatttcatcagacgctttggccttggcacagtcaaagctggccgccgaacttgaaggactgagcaacagtgcagaaacactggcaagcactgcgaaaacggtcgatttgatcatcacgcttttctcctcaggtacgcaccacacccgtaccaaacttgcgaatcgccaggcaatacccaatcaacgccaccgccgccaacaacccgcccgccgcgccaatccacgcaaaaccgaagtggctgccgacccagctgcccatcagtgcgccgccgccgatgccgatgttgtagatgccggagaacatcgccatggcgacgtcggtggcatccggcgcgagtaccagcaccttggactgcatggccaggccgaagcccatgattgccatgccccagaaaatgctgaggaccaccagataagattcggccccgctcaagggcaacaacagcgtcaggcatgtggccagcaggaacaccgcgcccaccacgaacaggtggggattgaaacggtgcaccaggctgaacagcagcgagccgatgatgcccgcgccgccgaacaccaacaggatcagggtcacggcgccgccgcccatgccggcgacgccttcgacgaagggttcgatgtagctgtaggcggtaaattgcgcggtgatggtcaaggcggtcagcacatacagcgccaccagcgccgggcgcttgaacaacagcggcaggctgcgcagggagccggagttctggctcggcagcaacggcagtgtgcgcgccagccagaacaccagcccggcggcaaacgcgccgatcaccaggaaggtggtgcgccagcccatggcttcgccgagcaggcggcccagcggaatgcccaggaccatcgccagcgaagtgccggtggcgagcaggccgagggcttgcacctgcttgccttccggcgccaggcgcaccgccagcgaggccgtgatcgaccagaacagcgcatgggacaaggcgatgccgatgcggctgagcatcaggatgccaaagctggtggcgacgctggagaggatatggctggcgataaacatgccgaacagcacgatcagcagcttgcgccgttcgacgttgcgggtcaggagcatcaccggcaacgaggtcagcgacacgatccaggcatagatggtgagcatcagcccgacgctggcgatgggcatgtcgaagctggcgccgatggcgctgagcagcccgaccggcacgaattcggtggtattgaacacgaaggcggccagcgccagggcgatgaccggttgccaattggcttgaggcgttgcggctgaaatgctcattggcgggcgaggtactctggcgatggtcaacggccacgcagaacagcgcagccgccgagcattctataggtttctcggcccgttgttgacgcggatcgtcgccgcgcggctcagggcgaggtcagggtaatcacgtaattgcccgactgaatcggcttgccggcgttgtccaccagcagataacgctggtcgtaataacgcccgctgccgctgtctgccaccagccgcacgtgggccgcgttgacactggccaccggcgccacgttgctgacatccaggcggctgccgcgactggcgctggcacagccggtcagctccatcaccgcaccactgcgcgcatttgtcgcacagccgggctcgacgatggccccccggaactcaatggtgcccccgcccagtgtctgcgcggcactgccgctacccgcccataggcacaacaggcctgcaaccatcgaaacacgtttaacgttcatgccgacactccttattgggctctcactcaggaagtcgtctggccgggcgttaacttgagcggtttcgcctcaaagtgtgcgctggatcaaggatccacctgccccatcaactcgggaatgctttccggccgcttggcataacgctgagccagggccgcgcacaccatcaactggatctggtgaaacagcatcagcggtagaatcagcacgcccatgctcgccccggcgaacagcacctgggccatgggaacccccgtcgccaggcttttcttggagccgcagaacaagatggtgatgcggtcttcctggctgaagccaaaggctttgcccagcacagtagacgccaccagcaccagggccagcaatacgcagcaggccacgaccaggccaccgagctcccacagcgggatctggtgccagatgccttcgttgaccgcttcactgaacgcgccgtagaccaccagcaggatcgagccctggtcgacaaatttcagccaggatttattgcgtccgacccactcgccgatccagcgccgggcaatttgccccgccacaaacggcagcagcagttgcacactgattttcaggatcgcatcgactgtagagccgccatcaccgtgcacgttgagcaacagggtcaccagcaacggcgtcaggaagatgccgaacaggctggaggccgctgcgctgcaaatcgccgccggaatgttgccgcgcgccagcgaagtaaaggcaatcgccgattgcacggtggccggcaacgcacagaggtagagcatgcccatgtacaggtctttgccgatcaggggcgacagcaccggcttgagcgccaggcctagcaacgggaacagcacgaaggtcaggctgaacaccagtaaatgcaggcgccagtggccggcaccggcgacgatggcctggcgtgacagcttggcaccgtgcaggaaaaacagcagggcgatggccaagttggtcacccagccgaaggccacggcggtctggccgctggcgggtagcagggaggcgaggatcaccgtggccacaagcgtgagggtgaagttgtcgggcaggaaacgcgggcgggtcataagcaaatcttccaggggttgccaagagcatcgtcgcgactctaacgtaacggcctgttaccgactaacgccaatgagccagtaaatgccgcctaaaggacatgaaaaaaccgtgcgccgcagtgtgcccgggctttccagcctgccacggccggtgtatggccgcactgagtcactgcccaatcgtgcgctgactcgacggcacagccacccgtgggtgcagttgtcttacgcgatttccggggtgctggagatccagacaggcgccggccgttttgtcgctccgccccaacgcgccgtgtggataccggcgggcgtgccgcatcgggtgttcagttcgccgcacaccgaaatgcgcagcctctacctggattgcagcgtcaccacgtgggctgccgagcattgccatgtccttgaggtgagcagtttgttgcgcgagttgatccgcagcttcagcgaactgccggtggaatatgccgaggacgggccggatggacgcttggcgcaagtggtgctggaccagcttgccgcggcgccgcaggtggatttgatgctgccgttgccactggacccgcgcttgcggcagatctaccgcagtttgaacctgcacccggaacagcagacgacgttgggtgattggagccagaagctgggcgtgagtgagaaaaccctcagccggttgtttctgagcgataccggcctgacgttcagggcatggcgccagcggctgaggctgttgaccgccctgcccgccctggaacaaggcgagcgggtgacggatgtggcgctggcgtgtggttatgagtccacttcggcgtttatcaatgcatttcgccagcagttcgatgccacaccgggtgagtttttccgctgattttcagacgaaaaatatcaagtgtgggagctggcttgcctgcgatagcagtcggtcagccgataaatttgctggctgatgcaccgctatcgcaggcaagccagctcccacattgctgactgcattccaactgcctgcaaaggctcagctgccattcccgccatgggcttcttcaaagaagtagtccttccagctcgccgccttgtttttcaacacacccagttcctgcagtttctcggcatagataaaggtgcgctgcggcacgatggtgaagtcgatttccgggtcctggacgattttctctaccaggtccagcggcagtttggatgcttctacgcgaatataggttttggcggcagcgggcttgtcggccttgatgatctgctcggcttcggccagcgcgtcatagaacgccttgtaggtcttggggttctcgtcgtggaatttctcggtggtgtagagcacgttgaacgacgcctgcccgcccagaatgtcgtaggaactgagcaccttgtgcacgttggggttcaacagttcctggtactggaacggcgggctggaaaagtgtgagttgatctccgagccgccggcaatcagcgccgccgtggcgtcggggtgggcgaggctgatggagatgtcgtcgaatttcttgtaattggcatcgccaaactgcttggcggtttcaatctgcaaggtgcgcgactggaagcccacaccggcggccggcacggcaatgcggtccttctcggtgaagtccttgagcgtcttcacattggggttgttggtcagcaggtaattgggcatcgaacccagcgaggcgatggccttgacgttctgcttgcccttggtccggtcccacagggtcagcatcggcggcacgccagccgacaccacatccagcgcgcccgccagcagcgactcgttcatcgcagtggcgccggaaatgctgttccactccaccttgatatccaggccctgttcctttccgtgcttttcgatcaggtgctggtcgcgtaccacgtcgagaatcaaatagccgataccgaattgctgggcaatgctgatcttgccttcggcctgggcgccggtgctgagcaatgcgctcgcagcggccagggacgcggccaggagggtcagggaggagcgcttgaaggtcatggagaggtccactgcgatgtcgagaagggagtggagcgtagcgatcatttttaagacacgaaaagaatatctagctctattcttatgcaataagtaaccaccgctcagctgttatattgcgccaccccttatatcgccgtgagtcgccccatgctgcgcaccaacctcaatgaaatgctgattttcatggccgtggtcgacggtgccagctttgtcgccggcggccaggccatggggctgacgcgttcggcagcgggtaaagccgtaatgcgtctggaagacagcctcggtgtgcgcttgctcaaccgcaccacccgcaccctgagcctgaccgatgaaggccgtgcgctttacgatcagggcttacagattctggcagcggtggacactgcgcaaaacagtatcggccagccgagcggcacgccacgcgggttgctgcgcctgacggtgccggatgcctttgggcgccgcgtagtactgccgttactggagggttatctgaaagcctggcccgaagtacaggcagaagtcagcttcactgaccgcgtggcggatatcgtcgaggacggcttcgacctggccatacgcatcggcggcgagaatgccgaccggcaactggtgtcccgcgtggttgcacgctaccacgcggggctgtgcgcagcgcccggctacctcgccgaacacggcacaccccgcgacgccgacgccctcgcacatcacgactgcctgcatttcagcagccgcacccgcaaacagagctggcgctttcgtgatgaaggcggcgactggttcaaagcaccggggcgcagccgcctgcgcctggacagcggcgaggcattgcgcgacgccgccgtggccggcatgggcatcgccttgctgccggactttctgatcgccgacgacctcgccagcggccgcctggtgccggtgctgcccgaactggacgccggcaacgtggaaatcctggcgatgtaccccagcaagcgctacctcgaaccccgggtacgccgttttatcgacttgctcgccgagcgattgccaggctgatcaatcggcgtgggccaccgccttgatctcgacgatctgcgcatccgatgccagatagttcacccccaccagcgtggccgccgggcgatggctgccgatccaggctttccactcggcaaccactgcatcgaaatcacgtttggcgtgcacaaggtagatatccacggcggcgatatttttacgaccgacgccaaaacctgccagcacgtggtcgaggttctccagggtttttcgggtttgcgtagcggcatcaccgtcaacgaactcgccctcaagcgtgtgggaaaactgcccgtcgataaaaatcgtaccgttgacgctgtagccctggctgacactgttgccttcttcccacgcgacaccgtggtgatagatagaagtccgggtactcatgtgaatgtccttttgggggttgattggggaaactctaacaaggccattggcgaacggacgtcgacactgaaacgagcaccgttcgcgcaaaaaatccccatgcaacccgtgtggctggtattgtgccgcgctttgaaacactgccgccgacctgcgaggaaatggacgttgaacactgacgaaaaaatgaccggagacctgttcgaggtcgataagcgcctgtcactcaaacccgtggtggacttcaacgcctacctgcgcagcgcgttcggcgacggcccgtgcacctgcgttcgctgcaccgccggccagggcgatgaaaccggctacgcgttccagcacaccttcaccttcgacgccaaacccacccaccgccgcttcgctaccacggcgggcagcgatgtgttgatggtgttgaaaaaggcatggctgtcctacaccaaggccgagttgccgctcagtggtgtgctggcactggagacggtgaaagagtttgtcgagccgcagttgcaccgtcgtttggcgccgctgtttttggccagtgagttggtcaagatggtggacggcgaactgcagattcagccgcaagctgcataacgtcgaaaacaccaccgaacaaaatgtaggagctggcttgcctgcgaaggcggcggcattgccgataaagatgtcgcctgatccaccgctttcgcagcctcgctaaagttcgagagctcccacacgggatctgcgccagccctgaagcgtcagatacctgcgagcaccgcggcatcgccagtgcgccaaacgttatccactgtcacccgctggatcagccactggttttcctggcggaccagttcaacgtcgtagcggttcttcatcaaatagtgccgcgacgggtcgctcttgggcacgtgctgcgcttccaccaaagcatcaagtcgcgcacggtcgccgtccagcgtcacacgcgggttgctcacggagtgcgtggtgtcgagctggctgagcgcgccggataacgccgcgacaatggtttcgcgcccttccagcaccgggtattcaaaaccggctttggcggcggcaggccgaaaatcggagacggcctcgacggtgaacgccgaagcaagcagcacggggtcatgcaggtcgataccggcggcgaagcgataaagggtgtcgacaaccgcgagcttgtcggcggctgtttgaaggtcgaaagcggtcatggggttttcctgtgggttcagtaatcgatgatccgcgtacctgcaatcgtctgggcaaagcccacgccgaacagtttcgcgggcgtttcaaagccaggccggcgttcaccgcccatcactcggcgcgccgcttccacggcggccagcggggtgtagctgtagccgttgacggtttcgatcaccgaacgcgcaaccgtgccgtcggcgccggtgacttcggccacggcgcgggcgcggtgggcgtcgcgctggatttgtgtggggccgtcgggcagcagtgacaagtcgccttcggggaaagcctcgccggtgacgtgcacgaacatggcgatattcgggacggcgctggaatgccaggcgctgaccaaatcaccgaaggacaacggcgcacacagcaccgggccgtcgccgaaatccaggtgttgcagtggcgcgtccggggtggcgaccagtgcgccgtcgatgcgcgccatgacgcctgcgccgaggatctcgcccacactcatcgccgaaccgcgcgacatcgtgccgggcacctgcaaggcgatgttcagtgcgcgcggctgccgtacgcggctggcaacgtgcatcgccaggcagtcggtgggcaccacgtcccagcccacgccgggcagcagcatcacatccgccccgctgccgagttgttcggcgaggcggtacacattgatttcagccgtgatgtccagatagtcagtgccgctggcgatgcaggcgcgcatcaacggttcggcggtgtgagcaaaaggaccggcgaagttaagcaacacgtcgataccttccaaccggctttcttgcgcgctgaatacgcggtaaggcacgtccagctgtgccgcaagggatgccagccggggctcgttgcgcccggcaatcacaaggttcaggttgagctttttcgcctgctcggccgccatgcgcccggtgtagccggtggcaccgtaaatcatcaaggttttcataaggtgtgctgccagttcttgtagacgaattcgaggctgtagccgtccgggtcgaggacgttggcagcgtagtagttggggtcatagtgcagacgcacacccggcgcgccgttgtcggtggcgccgttttccagcgcagcggcgtaggctgcttccacctcggcgcggttgttggcgacaaagcccacgtgcaccgcccggccctcgaccacgccttcgcgcagccagaaaaacatgcggccgttggcaccaaaacctttcaagtcgggatgaccgggcgggccatccttgccgtcgtagtccaggcgcgcagtgatgcccagtggcgcgagcgttgcttcgtagaagcggagggaacgctcaatgtcgctgactgaaataaacagatgatccagcatggtgtggcctcgcaactcagatgatgtagccgcctgcgacttcgatagtctgggcattgatccaacggccttcgtctgacagcaacagggcgatgacccgcgccacgtcttctggttcgcctacgcggcccaaggcagtttgcccggccagcagagcttcgaattcgtcattcaagccaccgcccagttcagtacgaatggcacccggcgacacagcgttggcacgaatgcggcgctcgccgaattccttggccatgtagcgggtgagcacgtccagcccgcctttgaacgcggcgtaaggcgcaacgccagcggtggcaacgcgcgtcgtggcactggtgaggttgacgatgctggcgtgttgttccagcagcggcagcaaggtctgggtgagaaaaaacgggcctttgaggtgcacgttgaacaggccgtcgaattgcgcttcggttacgctttcaagggggttgaacagcccgtaaccggcgttgttcaccagcccgcttaacgtccctacgccccaagtagcctgaagggactgcacaacggcatcacggaacgccgcaaaggtgctgacatcagctacctccagtttcagcgccacggctttgccgcccgccgcttcaatacgctgaaccaccgcccgcgccgcgtccgggttacggttgtaagtcaggatgacgccatgcccctggcgggcgcacagctcggcggtactggcaccgatgccacggctgcctccggttatcacgatgacgctcatggcctgctccactgtcgaaacgttgagtgaccacagtagcgatcaccctgccccccgacgcagccgttcctgcctcaatcctgcctgtttctgcttttcgcttgcgcgctgccttaagagaggaacagcatggccaccatgaatacacaattgatcgaattgcgtgccctggccgcaagtgccgaaaaccgccgcaccgagaccggcatcccgcgtgtggcgatggttcagggcgcgattcccgagcacatgctcgcagcggtgtatgacccgatgatcaacctgatcctgcaaggcaccaagtgcatgaccgtgggcgaccgcaccctgcactacgaccccgcgacttattttgtgatgtctatcgagctgcccgccgtcggcgtggtgaacccggcagcgacgggtgagccgtacctggcagtgagcctgaccctggacccgacggtgctgaccaccttgctcaacgacttgccggtacccagcgggcgttgcgagcaggaggccgggttctccgtggccgccgtcacaccggcgctgatggacgcgtggatccgcatgctgcgcctgatgggcgacccggttgcgattgccgcactggcgccggcctatgagcgggaaattctctaccacgtgctgcaaggcccgcacggctggatgctgcgcgagattgccgcgccggacaccgccatggcgcgcgtcagccgggcgattcagtggattcgccgggattttgccgagtcgatccgggtggaagcgctggcgcaggaagcggcgatgagtgtgtcggcgtttcaccggcacttcaaggcagtgaccaacctgagcccgctgcaatatcagaagcgtgtgcgcctgttgcaggcgcgcaccttgatggtggccagcgccagcagtgtgaccagcgcggcgtttgaggtggggtatgaaagcgcgacccagttcagccgggattatgcgcgggtgttcgggttgccgccggccagggatacggcgcgaatcttggcagcggcgcgaagctaatgtggcgagggagcttgctcccgctggactacgcagcaggcccattttttggggccgcttcgcggcccagcgggagcaagctccctcgccacaggtagagcgtcagttcaacaaggttatttacgcgcggcctcccactgtttgagcaagtcaccgtaagccaccgtctcgcctttgggcttctcgttagccagtttcggcttcggcgcacccggctggtcgaaccagtattgcgcgtcacgctcggggttcattttcgggccgcacaccggttgcaccttggagcgctccaggcgcgtcatgatcgcgtcctgctccttggccaggttgtccagcgcctgctgtggagttttctcgccgctggcggcggcggcgatgttgctccaccacaattgcgccaaacgagggtagtccggcacgttggtaccggtcggggtccactcgacacgggccgggctgcggtagaactccaccaggccaccgagcttcggcgccaggtcggtcatggcctgggagttgatgtcggactcacgaatcggcgtcaggccgacgatggtttttttcagcgagacggttttcgaggtcacgaactgcgcgtagagccaggccgcgagtttttgcttctcgggtgtggacttgaggaaggtccaggaacccacgtcctgatagccctttttcatgcctttttcccaatacggcccgaccggcgacggcgccatgcgccacttcggcgtgccgtcggcgttcaccaccggcaggcccggcttggtcatgtcggcggtaaacgcggtgtaccagaagatctgctgggcaatgttgccctgagacggcaccgggccggattcggagaaggtcatgcccgccgcttcgggtggcgcgtaggctttcatccagtccacgtatttctgcgtggcgaacacggcggccgggccgttggtgtcgccgccacgggtgacgctggagcccaccgggtggcagtcctccacgcgaatgccccactcgtccaccggcaagccgttgggcaaacccttgtcgccgccaccggccatggagaaccaggcatcggtgaagcgccagcccagggacgggtcttttttgccgtagtccatgtgcccgtaaatgcgcttgccgtcgatttccttgacgtcttcactgaagaatttggcgatgtcttcataggccgaccagttcaccggtacgccgagttcgtaaccgtatttttccttgaacttggctttcagatcggcgcgttcgaaccagtcggcgcggaaccagtacaggttggcaaactgttgatccggcagttgatagaccttgccgtccggcgcggtggtgaaagagatgccgataaaatccttgatgtccagggtcggcgaggtgaagtccttgccttcgttggccatcaggtcggtgatggattcggtcttgccgtagcgaaagtgcgtgccgatcaggtccgaatcgttgacccagccgtcatagatgttcttgtcggactgcatctgggtttgcagcttctccaccacgtcgccttcctgcagcaggtcgtgggtcagcttgatgccggtgatttcggtgaaggccttggccagcaccttggactcgtactcgtgggtggtgagggtttccgacaccacgttgatcttcatcccacggaacggttcggcagccttgataaaccatttcaactcttcgagctgttgggcgtcggtgagcgtggacggtttgaactcactgccgatccattttttcgcggcatcttcatacgcatcggcccaggccgtggcgctcaaaccgctgagggccagtacggcggccaatgaaatgctatgtcgcagcttattgtttttatcgaacatagagacctcctggttgtttattcaagcggagcactagccccaacgcatcacacacaacagccacaccagggacagcgcagtcgccacccagatgctccagccggttgcgccgattaccagcaaatgcaggtaggcgctgccgagaagaccaataaacagccgatcaccacgggtggtgctgatcggtagaaaaccgcgccgggggatgctcggcgagcgcagctcccaggtggtcatgcccaccaggatcaaggcgatgccagcaaaaaacagcgcggtgggggtggtccaggccatccattccatcatcgactcctctagacccggcccagggcaaagcccttggccacgtggttgcgaacaaaccagatcaccagcatgcccggcaggatggtcaacacccccgccgctgccagcacgccccaatcgatgcccgaggccgagaccgtacgcgtcatcaccgccgcgatcggcttggcgttgaccgaggttaaagtgcgcgccaacagcagctcgacccaggaaaacatgaagcagaagaacgccgtcacaccgatgccggagccgatcagcgggataaaaatcttcacgaaaaacttgggaaaactgtagccgtcgatgtaggccgtttcatcgatttccttgggcactccggacatgaagccttccagaatccacaccgccagcggcacgttgaacaggcaatgggccagagccacagcaatgtgggtatcgaacaggccaatcgacgaatacagctggaagaacggcagcagaaagaccgccggcggtgccatgcggttggtcagcagccagaagaacaggtgcttgtcgcccagaaagcggtagcgcgaaaacgcataggctgccggcagcgccacgctcagggagatcaccgtgttcaggctcacgtagtacagcgagttgaggtaaccggtgtaccagctcgggtcggtgaagatcaccttgtagttggccagggtgaaatcctgcggaaacagcgtcagcctgccgaggatttcggtgttgctcttgaaggacatgttcagcagccagtagatcggcaccagcaggaacaggatgtagatcagcagcggaatgaccttgcgcttgctcatgtcggcggcctcagcggttggcgtcggagtgggtcatggcggtgtagaacagccaggacaccaacaggatgatcaggaaatacaccagcgagaatgcggccgccgggcccaggtcgaattggcctacggccatctgggtcagcgtctggctcaggaacgtggtggcgttccccggcccgccgccggtgaggacgaacggctcggtgtagatcatgaaactgtccataaaccgcagcatcaccgcgatcagcagcacgcttttcatcttcggcaactggatatgccggaaaaccgcccaagccgatgcgcgatcaatccgcgcggcctggtagtacacatccggaatcgcccgcagccctgaataacacagcagcgccaccagcgaagtccagtgccacacatccatcaccagcacggtgacccaggcgtccgccgtgttcgccgcgtagttgtagctgatgcccaacgcattgaggctgtaaccgagcaaaccgatgtcggcgcggccgaaaatctgccagatcgtgccgaccacgttccatggaatcagcagcggaatggcgaggatgatcaacaccagcgacgaccagcggcccttggtcggcatggtcagggcgatggcgatgccaagggggatttcgatcagcagtacacacgccgaatagatgaactggcgcagcaatgagtcatgcaggcgcgggtcaagcagcacctgtttgtaccagtcggcgccgacgaaatagcggctggactggtcgaagatgtcctgcaccgagtagttgaccacggtcatcatcgggatcaccgcactgaatgccaccagcaggaacaccggcaacaccagccaccaggccttgttgttctgcaccttgttcatggctgcacctccagcaggtagtcgtcggcgtagaccatcagccattgcgcggggaagctgatggaggcctggccttcaggcaccggtttgtcttcggccaggcgcactttcaacggcgcaccgtcgaggttgagggtcatgatcttgtaggtgccaaggtcttcaacgtgcacgacatcggcctgcatcgcgtcagggttgtactcatcccacacgtggataaattccgggcggatacccacctgcagctttttgtagtctgtgtcgcgcaggcattgctgcaacgactcgggcaacggcaacagcgtgccggcaaaacgcaccccgcccgcctcggcctgcacctcaatcaaattcatgcccgggctgccgatgaaatagccgacaaacgtgtggcttggccgctcgaacagttcgcgcggcgtaccgaactgcacgatctgcccgccgtacatcaccgcgatcttgtcggcgaaggtcgaagcttcaagctggtcgtgggtcacgtagaccatggtgatgttgaactgctcgtggatctgcttgagcttgcgccgcagtttccacttcaggtgcgggtcgatcaccgtcagcggttcatcgaacaggatcgccgacacgtcgtcgcgcaccaggccacggcccatggagactttctgtttttcgtcggcggtgaggttgcgggctttcttggtcagcaggttttgcaggtcaagaacctcggcaatttcctgcaccttgctgtgcactttcgcctcggccatgccctggtttcgcagagggaaggccaggttgtcgaacacggtcatggtgtcgtacaccaccggaaactgaaacacctgtgcgatgttgcgtttttccggggtcagctcgttgaccaccttgtggtcaaacagcacctggccttcggacgggctgagcaggccggagatgatattgagcaaggtcgacttgccgcagcccgacggcccgagcaaagcgtaggccccgccctgctcccacacgtgattcatttcccgaatcgcgtagtcctcagggccgttaggcgcagggctgtagctgtgggcgaggttctgcaaatggatctcggccatcaggcaaccctcgcaacacggcgcccgggggcctggaccaagcggccctgaccatcgaacacaaacagtttatgggtggggatatacacgcggatcggcgcgtcgacgtcgtactcgtgtacccccggcaagtgcagcaccagcaggaagtgctcgctgcgcacatgcagaaaggtttccgagccgctgatttcggcgacttccacggtcactgccagctccaggtcatcgtcgttgcttggcaccaggctgatatggctggggcgtacgccgaagcggaattcgccctcgccgatggggcgcaggtcgacgttcaacggaaagtgcacgaagttggcgaagctcacttcattgccgctgatccgccccggcatcaggttgatcggcggctcggaaaacagctcggccgccaacacggtttgcggctggtggtagacctcggcagccttgccgctctggatcacccggccttcgtgaagaatggtagtggtgccgcccagggccagtgcttcgttgggttcggtggtggcgtagatggcgatggtgtggcgcgccttgaacagctcgcgcatttcctggcgcagttcttcgcgcagtttgtagtccaggttcaccagtggctcatcaaacaggatcagctcggcatccttgaccagcgcgcgggccatggccgtgcgctgctgctggccgccagacaactccagcgggtggcgcttgaggaatttttcgatgcgcagcatcttcgcggtttccagcactttgctctggatcacttcgtcagacacaccggcctggcgcaacggcgaggcgatgttttcgaacacggtcatggtcgggtagttgatgaactgctggtagaccatcgagacgttgcgcaggcgcaccggcttttgcgtgacgtccacgccgttcatcaggatgcgaccgctgtcgggtttgtccaggccagccatcaggcgcatcaggctggttttgccggacagggtgcggccgagcaggacgttgaaggaaccggcttcgaaacgcaggttggcatcgtcgatccaggtttggccttcaacgacgcgggtgacgtgctccagggtcaatgacatgacacgacctttttattattggaatgaatctggccattcgtcagagcgagtttcgtgccaaaacggcaagtggttgatgtgtaaagaaatggggtcattgcgatgttcaggagtgaacactcctgctgaacaactgaacacctgtggggttgacaatgaacagttctgaacaacactctcatgcccaatgcaggctaaatgtgggagctggcttgcctgcgatagcggtgtatcaacttgcacattggctgctgacacaccgctaccgcaggcaagccagctcccacagtttgatcgcgcaaggctccataaaaataacaataaaaagaaggtcaccatggccgaacccttggctcacgacacccttatccaggaatcctggcgccgttgccgcgcctttggcctggaccaccaaagccctcccagcttcgaccaactgcccgccgagggcatcagccagttactggaaagccagcactctttggtgcagaccacccaccaggaagtcctgccctattacgaaaacatcctgagcaactccaactgcctgatcatgctggccgacaaccaggggcaggtgctgacgtcatggggcacccagcgctttatcgagccgaaactggcgcgcggcttcaaccccggtgccagctggagggaacgctccagcggcaccaatgccatcggtaccgcgctggcctgtgcccaggcggtgcacattgagcacgacgaacacttcctcaaggccaaccgcttcatgaccggttcggcggcgccgatcttcgatgctcagcgcgaaatcatcgccgtgctggatgtgtccagcgacagttacctgccaccctcccacaccttgggcatggtcaagatgatgagccagaccgtggaaaaccggctgatcctcaacctgtttcgcggtgagcatttccaactgaccttcaacaccggcctgaacaacctcgacagccaatgggcgggcctgctgatttttgatgacagcggccaggtgctgtcggccaaccgtcgcgccgacaacttgctcggcatcagcctgtctcgggtgctgatcgacagtttgttcaaggtctcgctgctggaactgttgaaccagcccgaaggtttaccgttttccttgcaggcggcgggacgcaaccggtttcagtgtttgttgaaacgcccgaagaaaatgccgctgcaggcgcgggtgttcagcgaaccaaaacccagcgaacctttaccgcaaaagccgaccacccttggcctcaagaccctgcattttggcgacgcccgtgtcgaaaaggccgtgcgccaggcagaacgcctgctggaaaaagacattccgctgctgatccacggcgagaccggcgtgggcaaagaggtgttcgtcaaagccctgcaccaagccagctcgcgcagccgtcaggcatttatcgcggtgaactgtgcggcgattcctgctgagctggtggaatcggagttgttcggctacgaaaaaggcgcgttcaccggtgcgaatcagaaaggcagcatcggcctgatccgcaaggcggacaagggcacgctgtttctcgatgaaattggcgatatgccgttgccgacccaagcgcgtctgctgcgggtgttgcaggagcgttgcgtgcagccggtgggcagcagcgagttgttcccggtggacttgcggatcatctctgccaccaaccgcacgctgcgcgaatgggtgcaggccgggcgctttcgtgaggatttgtactaccgcatcggcggcctgaccctggaactgccgccattgcgtgagcgaacggacaagcgcgcgctgttccagcaactgtggcagcaacatcgtgagccgacccaatgggccgggctgagcaacgaagtgctggcgctgtttgagcaacacccgtggccgggcaatttgcgtcaggtcagcagcgtattgcaggtggcgctggcgatggccgaagaacagccgatccgcccggagcatttgccggatgacttttttgtggatctgaaagaaacgcccccgcctgcccacgagttcgtggacgaaagcattgacctgacccaacgtctgaaggcagcaggcgggaacatttcccaccttgcgcgggagttgggcgtcagccgcaataccttgtacaaacgcctgcgccagaacgaaggctgagctagcgcggcttgaccaccaccagcaggtcggtgaagtactcgacccggatcggcaggttgtcggcgagggctgataaggccgctgtcgtgtcgtccagcttgaacacaccggaaactcgcaggttttgcagggcctggggatcgaagcgcaccaggccgtggcggtaactggccagggtttgcagcacctcgctcaagggctggtcgttgaccttgagcaggccacgggtccaggcgtccgggtccgcattgccaatgggctgtggcggttcagcgcggccgtgatcgagcaccgaacgctggcctgccgccaccttgaacccttcgtcggcgtcacctttgaccgccaccgtggattcgatcacggtgaccactgtggtgccatccgccgcacgcttgaccagataacgggtgcccagcgcggtggccgtgccttgatcggtgcgcaccacgaaaggccgctgtgcgtccttggccacgtccacccaaagttcgccttgcagcagttcgatcacgcgttggccgccgtcgaacttcacgtccaccgccgaattgctgttgagctgcaactggctgccgtcttccagcgcaacctggcggcgctcgccgacgccggtgcgctggtcagccatccatacgggcaggtgctgcacgccaaaccaaccgcacaacaccacaccgagcacaccgagcacacccagcacctgggcgccgcgcgagcgttgcggggcaaaggcccgattcagggccatgcgcgccggccgcgcgggcaaggtgtcgaagttgccccacagggtgcgcatgcgctggatggccacggcgtgacgagggtcggcctggcaccagctattgaaggcttggcggtcggcgtcgctgaagtcttcgtcgtgcaggcgtgtcagccaattcgccgcttgctggatgatctgttcggaactcatgccaacgggtccgcgccatgcaggctgtggtagcagtgcaccagcgcggtggaaatgtagtttttgaccgtgctggaagacacgtccaggcaggtggcgatttcgctgtaggtcagcccgtcgagacggctcaacaggaaagcttcacgggttttagcgggcaggccggcgagcatttcagtgatgcgttccagggcttgcagggccacgtggatcgctgccgggtctggcatgccggcgtcttcgcactgaatggccagggcttccatgtaggctttttcaatgcgccgacgccgggcgccatcgatcagcagccttcctgccgtggtggccaggaacgcgcgaggttccttgatagtgtgcggctcggccagcatcagcacgcggataaaggcgtcgtgggccaggtcggcggcatgctgggaacaaccgagttttttgcgcagccagccgtgcaaccagccgtggtgctcgctgtacattgccgtaagggtctgctgacgggcgcaatcgcccggcgcggccggaatgtcatgcatgcgcaaaaaattctcaaatgggaaatgttaccaattgcgcgaacaatgccagtaaaacgcagtgggagcaagggtcgagcgaacccccttaaggcccctcccctggtttaaagccgaacccggtcaacaatgtggtagctggcttgcctgcgatcgcggtgggtcaggcgaagccaatttggctgataaaccgcgatcgcaggcaagccagctcccacattggatagcggtgtttgccacgccgactcttaacgccagctccacgacaccccggtgtagatgccgcgcccgtctgccggggttgagcgggcgacgtccagacctttgtcgtcataaccgggagtgacggtgttggcatagcgccgattggtgaggttgcgcaggtcgacccaggcttgccagtcctgctttggcgcgtcgtaaccgaacgtggcacccagggtggtgtaggacgcggcgtaataggaattggcgtaatccaccgccacttttgaggaatgctcggtgttgaaactgctgtagaagcccgtcggatggctgtaacgcaactgcgcctggtagtaatgcctggggatgcccggcagggcgttgtcaccgaagcggtcgtcatcgcggtagtggaagtcgctgtaggtataggcttggcgcagggcgagccggccattgcggccgccgtcccacaacgggctgagcaggctcagctccacaccctggtgcaccgtggggctggcgttggcttcagcgaccacggcattgctggtggaggtttgcacctgggtttcgacggtgagcaattcgtggcgcacttcggaacggtacagcgccaggtcccattcgccgaacgcggactcgccacggccaccgacttccagggtcgtcgcgctctgattacgcaggttgacgccttcgcgggccaggcccttggccgggccactggcgaaataccggttggaaccccagatcatcgaccacgcgtgcggcggctccaccgaacggctgaggttgccgtacacctgcaactgcggggaaaagtcgtagcgcaggccgacgcgtggcgcgtaatcccaatcgtgctggctcgtcggcgagtgggtttgcgggtaagtcacttcggtttcacggcgcgtgtagatcgcggccaggccggtggtcagccacaggtccgagaccagttccagctcattgccgacgtgcagcaccgtgtcggaacccaggtagctgtaatcccgggttttggtgccgggggcgtaggcggcagtatttccggcaggcgtgcgtacatattccgacgcgccgttgttcggcatcgcctgggtggtgcgcaaccccaccgtggttctgctggcgtggtcgaacacggtgtcctgacgaatgtaattcagggtgctgctgatgtcggtgtaggcgaccttcaggcggttggtgccttcgcgcaggtccatcggatagtcgtgataggccagcccggcctcgatgcgggcattgtcgtccaactgcaaagtggttttgttggcgatccaggtagaccccggttgcaggcgcttggaatcgcgggcgacgttcaggctggcggcggcccgcgggtcgtggctgatctggtagcgggtcagcttgccgggtgtgtcgttggtggtttcgcggtatcgaaaatagaagcgcgtttccaggtccgggttgaaccggtagccaaaattggccgctacgccctttccggtaccggcgctctgatgctgatagccgtcggactgcgagtcagtgaggctgatgtagtagtcggcatcgcccagcacctggccggagctgatctcgcgctgagcgtacccgcggctgccggcttcataacgcacctgcaacctgggcgcgtcatagccggtgcgggtcacgtagttgaccgagccccccaacgccagcgcgccctgatcaaaaccattggcgccgcgcaacacttcaacccggctttgccacagcgggtctttgagctcgtaaggcgtaccgcccgggccggtcaagggcaggccgtcgaacatctcataaagcccggaggcatgggaacccgggctgcggttcaagcccgaaccgcgaatcgacagcttcaccccctcattatttgccgccttggcgtacaccccggcctggtacttgaacacatcttcgttagtactcacccgcccctgctgcacgctgttcatgtcgatgtagttggtgccaccgggcacgctcttgagttgcgcctgggcgacttccccggcactggcttcgctgctggtgacttcgaccggggccagttgcagtgcttcggcgtgcatcggtgacgccagggtcagggcggtaaaaaggagcggggtttggcgcaacagcatcgggggcaaatccttggaattcgggggcatgacaagccgtagccatcacgcgaacggtgatgggaagccaaggggccccatcaagtcactcttgattaacggatcggcgccttcccacaacagcctcgggcgcattttgttttttaagtccgaaatcgaattaacacatgcaaactcagtatttaaggaaataaccgccacgcattactgtggagccactgagtcacccaagccccacgagatcgccaccatgcagacatccgccaccgtcatcgacttctcccttcaccgcaaacgccgccaggcgcgggctgcaggcgagttgatgtgggcgatgtacgccgcacgcgccggcttggcagtgttcgccgcgcagacggcacagcccagcgatacccgccgggcgtaaggccgatgaatttcctgcacgtgctgcccgaaccgcctgctcccctgcccaaacccggcaccgataacgacgacaccagcctctgtgttgcgcagaacctgcagcgcctgcgcagcaaacgccatttgtcgctggatggtttggcgcgcgcctgcggtgtgagccgggcgatgctggcgcagatcgaatccgggcgcagcgtgccgtcgatcaaggtgctgtgcaaaatcgccaagggcttgaaggtgtctgtagcagcgtttctggaagatcgagccttcgaaggcgtcgaggtgttgcccgcacagcagagcaaacgcctggtgaatgccgacggcgccttcgtcagccgtgcgctgtttccctacgatacggcgcgccaatcggagttctacgagatccgtttacgcgcactcggcgaagaaatttccgagggccacggccccggaatccaggagaacctggtggtcgcccaaggcgtgctggaagtcagcgtcaatgacgaacgctacctgctctccaccggcgattcgattctgttctacgccgaccaaccccatcgctaccgcaacccggcagacagtgaagcagtggccttcctggtgatcacctacccggaacgcctggactgaaatgcaaaacgccccgacaagtcggggcgtttttttatggcgcaggacctgtcagcaggtgcagcacatcatcggcatgccgttgcagctcatcatcatcggcatggcgcagtcgttcatcattttgttcatcagcatgcagcagttgttcatcatgtccatgctcatgcctggcatcggcatcattttgcacatcatgctgtcgcccatcagggtgcattccatcatgcacttcatcataggcatcgacatgcccatggccatcatcggcatcatcggcatgttcatgtcagtcatcattttcatggcgtcggccgacaggcacatcatcgacaggttggcgcactgcatcatcatcggcatgccgcagttcatcatcatcgccatcatttcggcgttggtcttgaactgagccatgtccattccggcggccggcttcatggtgcacatcatggcgtcagcggccatttcgcatttcagggtggccatcatcatcggcatgcccatcatcggcatcattggcatggaagcgttcatcggcatctgcattgcattcatcatgttcgaaactccgtaatcgacaggaaatggctaagttctggcgccgattctagagacgccagagggcggcgcaagacggcggcagagcagcaggaatggatgctcgaggaccagcttagttgaacaacacagcatcacacggcgcgataaccatcaattcggtgcgataacgccgaaaccctccaccaagccctcttaaacggcgttatggatattcgtttaagtcattgagaccaaccggaaggaaataaacgatctaacccgcctgaaaaagctcgggttcaagcgcgtgcataaactcttgcgcctcagaacccggtgtaaaccggaagccaaccatctcgtcgcaggccagaattgcggcgagtgcttcgcgcagctgaacttctgtcggtgaggtgcgcagcagtttgtgtgccggcaataacagttcggcgggagcaccctgggcgctcgccacatcgatcacggcaaacaggataaatcgcaggcgaacctcacgttcagtgggccaaaccgtttttcgcttacccaaggcaggcactcatcattaggaaaagtccgaggctattgccgacgaggaggtgtttcaacagatgggctgcaagataggccgtttcctacacgcaaacaggaattaccgcacctcaggtgcaggagacacaaaggcccaacccttgcagtaccttcaacagcaagtaatcccaggcccggctcaagaaaccgccctcttctaccctgtccatcaccaccaaaggtgtttgagcaaccgacttgccggctatttgaaaatcaatgacgccgaccacctgacctttctccagcggcgctgtcagcacgggttggctcatgacagccgtggcgtgcagatcgtcagccagcccataaggcacgacgatcgcgccctgatctgcggcattgagtctcaccgtagacgtatcaccaaaccagatgcgcctgcttgcgtatacctcatcagggccgatggccacgcgccgttcaaaggagcgggcgccccacttcagcagcttttgcgactcctgaaaccgggcccggtcatttgcagcccccagcacgacgacaatcaaccgcatatcgcccaccacggcggaagaaaccagactgaaacccgacgcttttgaatagcctgtctttagtccatccaccgcgagccctgtgctccataacaaccggttgcggttgatttggcgaatgcccttataggcaaattcgcgctgctggtagagcgcgtattcttccggcaggtcctgaatcagcgcccggctcaaaatggccaagtcccgcgcagtggtgaattgccctactgcctccaggccatggacggtcttgaaccgggtgttggagagcccgagtttattcgcgtagtcattcatcaccgccacgaacgctgcctgcccaccggcgatgtagtccgccagcgcgatacacgcatcattccccgactgcaccaccatgcccttgttgagatcatcgaccgtcacccggctgtcgggctcaagaaacatcagggaggaaccccgaagctgcgggttggccgccgcccaggcatcccgattcaccgtgacctcgtcgagcacgctgagcgactcggatttgatcgcctggcccaccacgtagctggtcatgatcttcgccaggctggcggggtcggtcttttcgtcggcattggagtgcgcgagcacttggccgctttcgtactccatcaccagccaggaagaagccgccactcgcggtggaacaacaagcgcttgagcacctacgccaaccgtataaaacaccatccaacacgcgaccacgccgcacacaaactttcgagcccattcactgttattcataaaccctgacaatcactttcaacccatcatttagctcaaacccaacggtttgagtacatcagccgcgcagcccttcaaactccagcacggcgcgccggttcaactgataggccgcctcgtcatcacccaattgcgccgggtaaaggtccgcataagacaccacctgaacctgcccgcccaacacgcccagctcgacaaggcgcgcgcgaatggctttggcccgggcctcacccaacacaatgttgtcttgaaacccgcccgcgttatccgtgtgaccttccaccgtcaattgcaccgatgggttatcaatcaacagttgagccacaaacttcaggcccgcctcactctcttcattcagcgcactactgccggacgcgaaataaatgacgtaaacattcgccgccgcctgttcatccgataacagctgcaacctgttttgcgccgcaacgttgaactcgctgatcgacagcaaatgcgcgcgctcagcctcctgtactgaactggaacaactttgcaacagcacacacagtgcaagcgccgcccccgtatgaatcaccctgaacacgcccacctctcaacagtgccaaacccttgaattgagctgaaatactgaagacctgtaagatatagatcaacgcgcaagatggactatctgatatgaatttcattgatattgatgaaatcgacctgaacttgttaaaagtcttcgaagcgctgatagaagaaggcggtgcgagccgggctgccattcggctgggggtgacgcagccagcggtcagtgctgcgctggcgcgcttgcggctgatttacgccgatgcgctgtttgagcggaccgggcgtggtttgcgcccgacggtgaaagccagcgaactggcgccgctggtcagcgaagccctgagccggtgccgccaggccctgtcgctgtccatcgaaagcaacaacatcgaaggacgaaccctcaccatcggtttgtcggatgacagcgaaatagccttggggcataccttgttgtccctgatcaacgagcgcctgcccggcctgcgcatcgttttccggcaaacccacagcggggtggtcgaggatatgttgatgcgccagcagatagacatcgccattaccgccggcggcttgtcgtcgccgctgatcgccagacaacgcctgggcgaaggtaattacttgtgcatcacggcgaacgaaaacacactgcctgcaaccgccgaagagtacgcacaaaggccgcatttgctggtgtcgtctggtggttttgtcggcattgtcgacgagggcttggcggcggtaggcctcagccgggcgttcaaggtgtccacttcacactttgcggcggtgccatttttactgtccggttctgacttgctgaccaccgtgcccgctcacgcggcgaaagcgatggagaaaatcaccacactgaagacttttccttgccctgtaccgttgccgtcctacgagctggggatgggtacgcgggtgggcagcaagcatgatcaggcgcttaaagtggtcaaggcgctcatcgtggaggccagcgaacgctgtttcttcctcaagcaataacctcactgcaccggcaggaagttcatcaacaacaagctctgcgcgtagttgaggccgatgcgccggtagcgctcatcgagcatctgggtcaacaagtcgaggcgcgcgacgatcttgccgaactccaccgcaaagctgaggttgctgccctcctccgaaatttcattggaaaacagcagcaacacgccattggcgtcctggcgctggcccagcagccaggtggctttctcgatgttgcgcgccgcgttgctgacaaactgcgggttgatcgagtcagtcacataaaactgcgtgcgcccgccgtgggcggtgacgatcatgctgccgatcgcatagataaaagcgcctacccggtcgccacgaaagtccgggctcaaggaatagctcagtgccgccaggtcacgccgctcacccaatgccggcaatggctggcggttttcgatggccttgcggatttcccgcgcagctgtcaccgcgtccggataacccgactgacgccactggttggggttgcgcaggtacagtttgttcatcaacaggtagaggctttgcaggttgtcacgcatgcccagggtggccatgcggtcaacgctggtctggaagaactcgtcaggcttgccattactgaattgccgggcgatatcgcgcccctgttgctggctgcaaccgcttgcgcagaacaggagcacaattgtcagcaccaacggccatcgggtgagaaaagcagttaacgttcgatccatcggcaccaggtcaggttctgtgggccacgcactcaatgcgcatggtcgtgacagggatagatcaagagattcccaaaaagtgcggcaagggcagtttgatcagtaaaggactacaagccaccaccctcgcggctgacacgagggcggtggcctggaccctaccgggaagtcagcgcctcggtcgcggcctcatcgatgaatgcggccacttcgaccggttgggacgccaacgaagcatggctcgcagccagggtgatgaccttacgggcgttgaggcgagccgacatgcgttgctggttttgcggattgatcatccggtcttcgctggaaatctgataccaggagggtttcttcttccaggcaggcgcgccaagggtgtcgccaaacgtgctggccagaggcgccttctgggtgacagccattaccagagcttcgtcggcgctcaggtcctggcagaagctttcatggaattttcccggcttgagccacaggtagccgtcgctgtccggctcaagattgggcgctgcggcgggcaggtgctgttgcgtgatgccgccggggctttcccctgcgtccggcgcgaacgcggcgatgtacaccagccccagcacattgggctgatcgccggcttcggtaatcactgcgccgccgtaggaatgccccaccaacagcaccgggcccttttgctgcgcaatcatcttgcgcgtgcgctcggcgtcgtcggccagcgaggtcagcggcatttcaaccgcctgaatggaggtgtagcccttgcgcgtcaattcgaggatgaccttgctccagtgcgccgcgccgccccaaaagccgtgaaccagtaaaaccgcaggtttgttgctcatcgccagactcctgttggatgaataaacacggattgccaatgacgttgaaaccgggtgctttttgggcacatcgcagtatggttcagagcgtgcgagctgtcgtcggcgcgatcctgtcgaatacttgcctgatcctccggtttttcgctcacgggatcgaaagccaccgccgggtggtctagagtttgacgatgtgtgcccgttgcaatgacagggcccagctttggctttaaatgcatggctttgaatgccgggtttgacgcccaccccaaaaaagaaaatagccgcacccaccgatgattagcaggtgaaagcaatggaattacgtattaaccaaaagtcctatcaggtcgatgctgacgcggacaccccgttgctctgggtgattcgcgatgacctgggcatgaccggcaccaaatacggctgcggcctggcccagtgcggcgcctgttcggtgctggtcgacggtaacgtggtgcgttcctgcgtcacgccggtggcgggcgtggtcgggcgtgaaatcaccaccatcgaggcggtcgaaaccgatgacgtgggcaagcgtgtggtcgcggcctgggttgaacatcaggtggcgcaatgcggttattgccagtctggccaggtgatggcggccaccgcgctgctcaagcacacccccgcccccacggatgcgcagatcgaagcggcgatggtcaacctgtgccgttgcggcacttacaacgcaatcaaaaccgccgtgcatgacttggcgaaggggattgcgtgatgaacatgcccaacgaaatgctcgaggtggccgccggtgacccggtgaacctgtcccgtcggcgctttctggccagcaccgccgtcggcgcgctggtcatcggtttcggcctgccgctgggcgcgccgagggtgtatgccgccgccgctactgccgctgagcgcggcacccaggtgccggcgttcctggagattcgcccggacggcaccattcgcctgctcagcccctttatggaaggcggccagggcacgcacactgccatggcgcagattgtcggtgaagagctggacgccgaccccgccaccttcgtggtcgaaagcgcaccgcccggcgaagcctatgtggtgatggaaaacggcttgcgcatcaccggcggcagcatgtcaatccgcatgagctacccaaccatgcgtcgcctcggcgccctggctcgggccatgctgctgcaggccggtgccgtgcaactgggagtggcggtggccgaactgaccacgcagcctggccgcgtggtccacgccgcttccggtcgctcgctgggctacggcgaactggccgggcgcgcgttggatatgccggtgcccgatccggccaccatcaccctgcgcgacccgagccagttccgctggatcggcaagccggtcaaacgcctggacgcctacgacaaatccaccggcaaggcccaatacagcatcgacctgaaagtcgacggcatgctccacgccgccgtgcaacacgcgccgcgcctgggtatgaccgtaggcagcttgcgcaaccaagcgcaggtggaagccatgaaaggcgtgcactcggtgcacaccctgcccggcgctgtggccgtggttgccgaacgctggtggcacgccaagcgggcggtggaagccatccaggtggattggcaggaagccggccccgactcgaaggtgcgggccatgccggcggatttttccaccgacaagtaccgcgactttctcgccgcccaacaaggcccggcgcgtgacgatgaaaacgagggcgatgtcgccggtacactggcaaacgccaagaccaaagtcgaagccacctatcacaaccaatacctgaaccatgcccaactggagccaccgtcagctttggcgcgtttcaaccctgacggctcgctggacgtgtggctgccgaaccaggcgccggacatgttccgcgccgacatcgccaagcgcaccgggctgtcgattgagcaagtcaacctgcactcgccgttgctgggcggctttttcggccggcatttcctgtacgactcggccaacccctacccgcaggccattgcactggccaaggccgtcggtcgcccggtcaagctgatctggagccgcgaggaagagtttctgcgtgacgtgttgcgcccattcgccgtggtcaaattccgcgcggcgctggacgacaagggcctgccgattgccattgaagcggtgagcgccactgaagggcctaccgaagcgctttccggcaaacagggtgacaaagtcgacccgacggccgttgaaggtttgtcgggcaaggcctacgccatccccaacaaacgcatcgcgcagatctacgtcaaaggcccaccgatgctgggttactggcgctcggtgggcaattccctgaatgacttcttctatgaggcattcctggatgaactggccgacaaaggcggccatgacccgtatgaactgcgcctgcatttgttgcgcgacaaccagcggctgaccaccttgctgcaggcggtgggtgatttgtccggtggctggaagcgcggcccctacaccgccgaggatggcaccaaacgcgcacgcggcgtggccatggcgtccccgtttggctcgcaggcggcagtgatcgccgaagtgtcgattgaacacggccaggtgaaagtgcaccacatctgggaggccatcgacccgggcagcatcgtcaacccggcgattgtcgaggcccaggtcaatggcgccgtggcgttgggcttgtcgcaaaccctggtggaggaagcggtttacgtggacggcaagccacgggcgcgcaactacgatctgtacccgatcctgccgccctcgcgcatggcgcaagtgcacgtaaggattgtcgagagtggtgaaaaaatgggcggtatcggtgagccaccgctccccgcagtggcgccggccgtggccaatgcggtggcgcaactgaccgggcagcgcatccgcagcctgccattgagccgatacaccttcacctgaccgacaaggaacgcccatgaacaacccacgattcgcaagaaccgcaggctggctggtgctggccggtgcggtcgcagccggtgtgctggcctggtatgccacccgcgagcccgcctcgccttttgagaaacaacccgccgccagcgccgatccggcactggtcagccgcggcgagtacgtcgcccgcgtgagtgactgtgtggcctgccacagcttgccgggcaaggcgccgttcgcggggggcctggaaatggccacgccgctgggggcgattcatgccaccaacatcacgccggataaaaacagcggcatcggcaactattcgctcgctgattttgaccgcgcagtgcgccatggcgtggcaccgggtgggcgacggctctacccggccatgccctacccgtcctacgtgaagctcagtgacgatgacgtgcgcgcgatgtatgcgttcttcatgcaaggcgtgcaaccggccgatcagccgaatatccccagcagcattccgtggccactcaatatgcgttggccgattgcgctgtggaacggggtgtttgcgccgagtgaaacctacgcggcaaaaaccgggcaggacgccctgtggaaccgtggcgcctacatcgtgcaggggccgggccactgcggcagctgccacacgccgcgcgggctggcgttcaacgagaaggcgctggatgagtccggcaaacccttcctcgccggcgccttgctcgacggctggtacgcgccgagcctgcgccaggaccccaacagcggtttggggcgctggagcgaaccggaaatcgtgcagttcctcaaaaccgggcgtaacaagcacgccgtggtctacggctcgatgaccgaagcgttcaacaactccacgcagttcatggccgacgacgacctggcggccatcgcccgttacctgaagtcgctgcccggcgacccgcagcgtgacggcacaccctggcagtatcagacggtgtccaccgatccaagcgctccaggtgcccacacctacgccacccgctgcgcctcctgccatggcctggacggcaaaggccagcccgagtcgatgccaccgctggccggtgccacctcggcgctggccaaggaaaacgcgtcggcgatcaacatcaccctcaacggctcgcaacgagtcgtggcggcgggtgtaccggacgcctaccgcatgccggcattccgcgagcagttgtcggatcaggaaatcgcgcaggtattgagttatgtgcgcggtacctggggcaatagcggcggggcagtggatgcagcggcggtgaacaaactgcgtgggcatactgatccggcgagcagtagcccgattatcttgcacatgcgctgaatcgtttacctgttcgaaaggctgcccctccggcagccttttttttgtttgaaggttgccggaaagaactaaaagtccataatggacaaattagtttatagacggagatttccatgtccagtgcacctctcgtgatcaaccgggtacaggcccgggaactgctggcccaagtcgatgtaccccacatcctgcacaagctgtttcgcgacatggctgccgggcaagcggtgcagccggcgcaacaactggtggagttcccgaatggtgccggcgacttcatcaattacctgggtgtgctggccgaagatgaggtgtacggggtcaagacctcaccgtacatcgtgcgcgagcaagggccgctggtgaccgcctggacgctgttgatgtccatgcacaccggccaaccgctgttgctgtgcgatgccgccgagttgaccaccgaacgcaccgccgcgaccacggcgttggcggtggacgcgctggcgccggcctctgcgcggcgcctggcgatcatcggcagcggcaaggtggcccaggcgcatgtgcgttatgtgcagaacctgcgggactggcagagcatttgtctgcactcacccaaccttggcagcgccagtgctgaaaccctcgcccagctcaaaggcctggacccacgcctgagcatcgcccattcgctcgatgccgccctggaagatgccgatgtgattttgctgtgcacctcgtctgccggcccggtgatcgacccggcgcgcctcggcaaaccggcgctgatcacctcgatcagcaccaacgcgccgcgcgcccatgaagtgccgccccacagcctcaacgacatgcaggtgttctgcgactaccgccagaccaccccgggcgcggccggcgagatgctgatcgccagtgaacagcacggctgggacaaacgcgcggttatcggcgacttacccgaattgctcagcgatatcgtccagcgcccggggtatgaccggcacgtgtttttccgctcgatcggcttgggcctggaagacgtggccctggccaatgccctttaccagatccagcgctaactgctgttaaggagacgtttatgagccatgcagatttcatcatcatcggcggcggcatcgcgggcgcgtccaccgggttctggctgtcgcaacacgccaaggtgctggtgctggagcgcgaaaaccatccggcctaccactccaccgggcgctcggcggcactttacaccgctgcctatggcacaccgcaggtgcgcgcactgaccctggccagccgtgagtttttcgatcatccgccgacgggtttctgcgagcatccgttgctgaccccccgtggcgagatgaccgtggatttcaacggcgacccgacagaactggaaagccaataccagagcgccaaagccacggtggcgcacgtgcagcggctgagcgccgaagaggcctgtgcacggctgccgatcctgcgccgggaaaaagtccacggtgcgatcttcgaccccaccgccagcgacatcgacaccgacgccctgcaccagggctacttgcgcggtatccgccgcaacagcagcgaagtgcgcaccgacagccacgtgctgggcctgagccgcgacgccgacggcctgtggcacgtgcgcacgcaggacgcgacccacaccgcactggtcatcatcaacgccgccggcgcttgggccgatcacatcggcgggctggccggtgcggcgtccatcggtttgcaacccaagcgtcgctcggcgttcatcttcgccgggcctgaaggccaagacacgcaccattggccgatgctggtcgccctcgacgagtcgttctacatgaagcccgacgcgggcatgttcctcggctcgccagccaatgccgacccggtcgaacctcaggacgtgcagcccgaagaactggacatcgccctgggcatctaccagatcgaagaagccaccaccctgaccatccgtcgcccgacccgcacctgggcggggctgcgcagtttcgtgcacgacggtgatttactctcgggcttcgaccccaaggtaccggggctgttctgggtcgcggcgcaaggcggctacggcatccagacctcgccggccatgggccaggcgagcgccgccctggtgcgcggcgcgccgttgcctgcggcactcacgcggttcggcctggacgctggtatgctctcccccgtccgcctggagccgcattgatgaacaccgccgaacccgaaaaagtcatgcagaacttccgcgcgatcgccgatgcgatcgccacgctgttcttcccccatgccgaagtggtgctgcatgatctgcgcacacaaaccgttgattacatcgccaacaacctgtcgaaacgagccatcggtgacgactcggcactggaagacatgctcagcgatgatgccagcgaagtgaatatcggcccgtacgaaaagctcaattgggacggccagaaaattcgcagcctgagcaccgtgctgcatgaccacagggggcagcggctcgccgtgctgtgcatcaacctgaatatctcgctgttcgaaaacgccaaggcggcgctggacctgttcctgtcgccgagcaagctcatcccgcagccggactcactgtttcgcgatgactggcaggaacgcatcaacacctttctgcatgcctggatgcgcgagcgtcagttgagcctgaacctgctgacccgcgaccataagcgtgagctggtgctggcactgcatgccgaaggtgcgttcaagggcaagagcgcctcgaactacgtggccaatgtgctgggcatggggcgggcgacggtctacaagcacctcaaggagctcaaaggctgaacgccattcaacggtgggagctggcttgtcgggtcgccgcaccgctgcgatagcggtgcatcaggcaatcaaacattgactgacagatagctatcgcagcgatgcggcgacccgacaagccagctcccacaccgacctcggctggcttcaggtgcgtacggccactcagtcgccgtagatgtcggacttgaagtactgctgcgaaatcttctggtattcaccactggcgcggatgccgtcgatcgccgcattcaactcgctgaccagctcggtattgcccttgcgcaccgcaatcccggcgccctcgcccacgtatttcgggtctttgagctccgggccgacaaacgcgtaaccctggccacgtggcatcgacaggaaatcacttaacggaatggtgtcggcaaaaatcgcatccaggcgccccgccgccaggtccatgtagatttcttcgttgttgctgtagcgcttgacgttgatgcccttgggttcgaacacttcggtggcatagcgatcagtggtggtggcgcgctgcacgccgatggtcttgcctttgaggctggcgtactggtcgtccaccacggcgccgtctttcatcaccaggcgcgacgaggtgaagtaatacttgtgggtgaagtccactgacttcttgcggtcttcgttaatggtcatggacgataacgccatgtcgattttctttaccttcagagaaggaatcaggccgtcgaattcaccttccacccacacgcatttgaccttcatctgcgcacagagcgcgttgccgatgtcgtagtcgaacccgacgatcttgccgtcttgcgtcttcgaggcgaacggcggatacgccgcctcgatgccgatacgcagggttttctcggcagccagcacagggctggaggcgagcaggctcaaggccaggccggtgatgagggcgcgtgtcttcatgatcaggatctcgcaagttattgtcggtttggcaagagtgggaaagcgtgaagcgtcatattttatacttataattccatattggacttttgtgtattgatcgtcaatcaacccggaaccgacacggctgcgtgcaattaatcagcggcctccatcgtttctccacaaaacctcccatgaaagcgcatggtgatttcgcacaatcaccaccgcacaatcacccaaccccaggcacctggaccgagcccaccatgaacgacttccccgttgcatccacgccccgccccgacaacacccgagaaaccccggcgctggtgttgattgcggaagacgagcctgagatcgcggatattctgatcgcctacctcaagcgcagcggctttcgcaccgcccacgcgcccgacggccggcgtgcgctggacatgcacttggcgctcaagccggacttgttgctgctggatgtgttgatgccccacgtggacggctggcaggtgctggccgaagtgcgccaccgcggcaccacgccggtgatcatgctcactgcgcaggatcaggacctcgacaagctgatgggcctgcgtatcggcgccgacgactacatcgtcaaacccttcaacccggccgaggtggtggcacgcacccaggcggtgctgcggcgctcgctcgcccacaacgaccgcgccagccccacggtgctgcgggtggatgcctttgaaattgacctggaaagctatgaagtcacggtgcatatcggcggtaaacgcgtgccgttggcgctgaccgtcaccgaattcaggctgctcgcccaactggccaaggcaccgaaacgcgtgctgacccgtgccgagttgctggcccagtgctcaccggaaagtgacagcctggaacgtacggtcgacagccatatcagcaagctgcgccgcaagatcgaagacgccgggttgcaaggcgtgcccaccagcatccgtggcgtgggctaccgcttcgggagcgcctcgtgagaaagctcaatggcttgagccgccagatcatcctgtcgatgtcggccgtggtgttgtgcgtgatcgccctggcggtgattggctcgtacattttctacgcgctgctgtggacctactggccgctgaccaacgaagaagtggatgaatggttgcccgcaaacatcgagtgggcgtggatgggcctgaccacctgcgtcagcctggcggtgggctcgattgtggcgttgaagctgtcgcgccgtattttgatgccgctcaattcggtggccgagaacctgcgcaaactggcggatggcgacctggatgtgcaggctgtggccggtgaccagtccatcggtgaagccacggtgttggtggatgacttcaacagcatggcgcagcgcttgaaacgcatggcccaggagcaagcgttctggaatgcggcgattgcccacgaattacgcacgccgctgaccattttgcgcgggcgcctgcaggggttggccgagggggtgttcgagccggacaccgcgcagttctacagcctgctcggccaggtggaaggcttgacccgcctgatcgaggatttgcgcgtcgtcggcctggccgacagtggttatctggaactcaacttgcacgaagccgacctggccacgggcatcgaagacgacgtgaggctgttcgaaccgagcctggtggccgcaggcttcaggctgcaactggacctgcaacgccgcacgctgcgctgcgaccccgccagaatccgtcaggccttgctggcgctgctggacaatatccgtcggcacgcgacaccgggaaacgtcaacgtacacctgagcacccgcgacggtctgaactacctgcgcgtgcgcgatgacggccccggcatcgacgagggcttcgccacgcacatgtttgaagccttccagcgcggcgaaaactcgcgctcacgcgcccagggtggcagcggcctgggcctggccgtggtgcgcgccatcgccctcgcccacggcggcgccgtgacgtgccgaaacatggaaaacggggggacgctgctcgaactcagttggccggtttgatgcgagcgggaatttcaatgcgcttcttttcatggctgttccacacacccgaacgatatcggcactttgctttagtggatgcccagggcacctgcctcgcgttcaaaagctgccgcgctatgccggccaacgggcattgggtggaagttgaaggggtgacgctgagctggctgggcaaacccctcccgccagtgcccggccgctcgacgagcatgaccctgcacgatgacctgccgcgccttgaagcgtcgctgaaactgcaccgggcacgcctgaaaaagctgcagcaatattgggtgccactgcagcagcgggcgcccaaatgggtattggcgttgtggattgtcggcgtgttcgtgtcgctggcggcccagtgctacgcccactggctggtgatcgctccgctgattggcgggttgatcctggccgagatcatcatcgatgagcggcaaatgaccttgtcactgcgcgcagaccgcgcgcgcgatgcgctgagggaagcccgcgccggcgactgcccgcgcggtcagcccggcgattgatcaccgggccggcccttgcaactacagcaatacggtcgccagcatgcccagcgcgccgaggaaaaacccgatcaacgcgccccgccccggcacctgttgaaacaggccccacaccaccagcggctcaagcagcagcaaagaggtgacggacaccaccgtcacaatccagatatcgcctaccgccacatagccgagccaataagcgccgagaaggcacagcccggcaaagcacatcagcaccaccggcatgacaaacgacgcccatggcgcgccgtccacctgtgccagccgcgcagtggctacctcactgtaaatcgcacaaaactcacccagcaccatcaggcctagagcagaaactccgagtagttctttggacatatcaaaaattccttcgtattcagggacaggtttttcaactcccagcccgtgatggcacggctgccggagttgaggctgcgatacgaagtgatcttgaagagccctgaattatcgaagtactttcccatgccaatgtcctctgtggggtcggcggctcctggccgccgagagcgagagattcgcatgaaccgttcagcaacgtaaacagcaggtttactgcgcggcctcaggaggtccactgctccccgcccggccagtccttggtggggatatccgctagggtgccgtccttgaccccgtcgatcccgtagcgctcgatcgaatcgcccagtacctcaccgaacttgtccgacttggcctgcgcctggccttccttgaccagcccgggaatgagcgtggccaaaatcgccacaccggcgcccaaaaagcccagcacccccgccgtggccgccaggcccgggaggaagcgtggcaggttggcgccaagcaggccgagcccgccttccaccgccgaggcactgcccgccagcacgcccagcgagcctgcggtgatgccaaagccgccagtgagcttgtcgccgcgccgcagcgcgttgaccccgtcaaaaatgccataggccccagagacgataccggccagaccgccaatacctttggcggcttcctcgaagtttttcgccacgacttgggcgtgcttgccgtccttgacgttggccttgacctcatcgagcaggtcgagcatgaccttgccgtccttcatgtctttcagggtttgctcgccattcttgatcgacttggcgaggtgctcctgataccccttcgaaccgccctcggtcagcaccgtggcggtctgcacggagccggtggtgatgtcgacgatgttgcgatcggtcaacttgccgccgctctgcgccccgcgcgcaatggtgacaccggccaggaacagcccgctcaccccgtgcagcacaccgctgctgtaggcgcccttggcaccgccattggggtcaaggtcagagagcttgcccattttgtccaacgccttggtgccctgacggaacagatcccaattgccacggaagcccgccagcacctgatcggtggtggccacggtgccgtcctggttcaacagcaactcgggactttcctggcgcatctggtcgatcagcttgcgtactttgtcttcgtccaacgtctcgccaccgtccttgccgaacgcggttttgaggttatcgaagctggcgtccttgaacaggttctcctgggcgatgctggagaaattgtcattgagctgtttgtcgtattgggcggtgaatttggggtcgagtgcagcgttgtagagcgccacttccaggctgaactcagaagccgcgttctgcggcgtattgttcttgagcagctcgcgcatacgctcgccgctggccagttggtccttgtagaaggtcttgaagtcttcagcgtgcgatgactgggcgaccgcgccctggatcgccttggcatcctcgataccgaggatggattgcaggctggtggcggtggcgtagaacgtggccaacgcggtgtgctggtcggtcttgccatccttggtgttggcgtcccaggccgcgtcgagtgccttgccggacttgacctggtcctcataggtcttggtggcggcatccttcaggcccgggttttcctcaaacagcgtcttcactgccttgtcgcccgcgtccttgatgtagtcggcggttggcttgtcgccctgcaggatggccatgtggtcggtgatgtcctccagcagcttttgcggctcccagatcgcgcctgaacggttggcgatggagaccttgccatagtcgctgttccacaccccggcgttggccccgtcgaccaccagtttctgcgcctcctgcagttcgagcagaacggcggctttttgctccgccgtatatttgtccggatgttcgaaaatgtccttgtccaacttgctggtgtcgaccttgccggtgacgttgccggcggccacgtcggtgatcaggctggtcagggtctgggcgtctttgggcgcggagtttttcagccagctctgcacgtcgtcgcggctgatcttgccgtcgggcttgtcaccgatgctgttgctcgcggtgtcgagtttgcggaaggcgcctggctgggagaagaagttcagcgcttccttttcctctttgctcaactgcggattctgcttgaggtaatccttgatgttctgttcggtgacagccccgtcggcgcccgtcttgccacggatcgaatcgtacttggcatcgagaatcgcaccgtactgggccacttgtttggaaccggcgtcagcctccgggttggccttgaggtaatccttgtagctgccgatctcgctgttggccggcggcttggccagcgcctcgaaaccgtacttgccaaaatcctgcaagcgcccggcctcagtgccatggcgcgcttcaccgctcttggtgaagccgtcgacgctgctgttggccacgtcgttgccggtcagcgccttgccctggtcgtcgtagccgaccacgcggtcgagcacctggctggcacggaaggccgcgttcgggtctttgtcgaaatcgccgacctgctccttcagcgcatctttcacaccgctctggttgccgaggtttttcagcaaggggttggcatcaatgatgtcctgcgccgagcgcttgtcgtcctgtggcagttcccagacgatgcccgccttgtctgccgcttcgcggcgattgtcgtcctggcccacctggtcggcatgctgcaactcgcccttgagattgtcccagccatatttgccgaaatcctgcaggcgcccggcctcggtgccgtgcttggcgtcgccgcccttggtgaaaccgtcgacgcggccgttgtcgatgtcgttgccggccaggcgcgagccgttttcatcgaagcgctccacatgctccagcacctgcttggcgcggtaggcagcgtctgcatcgtgctcgaaatcgcccacacgttcgcgcaacttgtctttgaccccgctctgattgccgaggtttttcagcaaggggctgtcgtctatgatgtccccggccgagcgatggtcatccttggagcgctgccattcgatgccggcgtccttggccttggcccggtcgaccgcgtccccccactcggcgctggaatcgcttttagtggctgccttgatttcgggggtattgctgaccggtgatgacatggttttgctccttgagtgcgaggccgcagcgatgaccgtacggggcggtaatgccgggtggacacctgagagcaaaggccatgtctgttactgaaaaatgacagccttcctggcgccccatgatcaaacctgcccctgaagccaggaatgcgcaacggtgcaacggggtaaatggcgcttgtgaaatgttgtgaaaacggctcttcagtgcccgcattcgccccgaaccttgtccgcacaaacagcgagcactcgggtaccaaagccgggcacaaaagtaacaagtaacacgcccaccgcttttgcacgccaatcgctaaaagcgctgaatgcctcgtaaaccatggtctgcaaccgtatccaggagaaatggcatacgccttgcttcactctgaaaatcatctgatatatcagatgattttcaggagcagacatgtcccgatcgaccgatttttccagccctctacccccgttggcggccccgacaaaaagcgcagcgcagctgcgtgaactggcctatgcgcaaatcaagcagcgcatcatcagttgtgagtttcgcccgggcgacgccatcaatgaagcgcaactgaccgccgcactgggcattggccgcacccctatccaccaggcactgcaccgcctggaagtggaaggcatggtcacaatcatgccgcgcaagggcgtgatggtgaccgccctgtcactcaacgatgtactcgacatgatcgaagtgcgcgtcagcaatgaacagttgtgcgtcaagctcgcggttgagcgtgccaaagacgccgacatccaggccatgcgcgacatcctcgaccaaaccccggccctgctggccaggcacgacgtggccgggctgatggcgctggacctgcagtttcacatgtcgatttcggccgccgcccacaaccgggtcctggctgaactgctgcgcaacctgcacgaaaaacaggcgcggttctggtacctgaccctgtcggaaaaccatcacagcgaacgcatatacgacgaacacctgcaaatcctgcaagcggtggaacagcgcgacggcagcgccgccgtcgccgcgatccaccaccacatcgacgatttccgccgcgccatcatgcgcacgctttaatcactgactgcgagagcacttcatgactcaaatgaccttccacgtcgtcggccaaggcgatcaccaagccagcatcaaacacttgatcatcgccgggtgggccgggcgcaacaccgaagcggtggaacaccatattgccgaacttgaagccttgggcgtacgccgcccgacccaggtgccgtgcttctatcgggtgtctgccagcctgttgaacaacgccgccagcattcaggtgccggggaaggactcctccggcgagaccgaattcgtgctgatccccagcgaacaaggcctgctgatcggcctgggctcggaccacaccgaccgcaaggtcgaaagctatgacgtcacggtttccaagcaaatgtgcgacaagcccatcgcccaacaggtgtggcgttatgccgaagtccaggaacattgggaccacctggtcatgcgcacctggcgcgtgcgcgacggcgtgcgtgcgctgtatcagcaagggccggtgaccaacctgctggcgccggaaaccctgctgggtaaactcaacagcgatgccgccttgcctgccgacaccgcgatgttctgcggcactcagtcggtaatcggcgaactgggttacggcgaagcctttgaaatggaattgttcgaccccgtcctcaaccgcagcctgcgccaccactatggtgtcgagccgctgcccgtcgccgagtgaagccgatgaccacaattgcagcgtttgcccaggcacttgccgagggccgcaccaccagtgaaaccttggtcaacgacgcgttgaaacggattgaagcgcatcgcgcggcaggcggcgcggcctatatcagcgtcgacgccgacagcgccttgcaggcggcccgggccagtgacctggcgcgcgcatccggctatgtgccgtcggcactggctggcttgcctgtgtctatcaaggacctgttcgacgtgaccgggcaagtcaccgcagccggttcgcgcctgcttgccgatgccccgccagccacgcaggatgcggtagtggtcgagcgtctacgggccgccggcgcgatcctgctcgggcgcaccaacatgagcgagtttgccttttccgggctgggcttcaacccgcattacggcacgccgctcacccctctggcagacgggcgcgtggcgggcggctccagctccggcgcggcggtgagcgtggcattgggcatggcggtggccggcctgggcaccgacacgggtggctcgatccgcattcctgcggccttctgcaacctcaccgggttcaaacccagcgccagccgtgtgccgatggcgggcaccttcccgctcgccgaaagcctggattcggtgtgcgccctgacccacagcgtcgccgactgcatcctgctggaccagatactcagcggcgaatcgttggaaacccgcgccgcgccactggccgggctgcgcctggcggtcacccgcgacctggtgctggaccaactggacgccattgtggcggccgccttcgagcgcagcctggacctgctcgccaaagccggtgcgaccgttcgttggttcgacttccccgagctgcacgaactgccgcgcatcaacgccacaggcgggctgacgtccgccgaagcctggcacggccatcgccggtggctggaaaccgacagcagcgaagcctacgacccgcgcgtggcccagcgcatacgccggggcgccgccatcagcgccgccgactacctggacatccgcagcgaacgccaacgcttgatcaaggtagcccgcgaacgcctgggcgatgccgatgcctggttgctgccaagtgtcgcgctcgtgcctccccggcttgccgacctcgccgatgacgcagcgttcttcgccatcaacgccctggtgctgcgcaataccagcgtgctcaacttcctcgacggctgcgccctgagcctgccgtgccagcggggcgacgagttgccggtcggcctgtcgatcgccggcttgcacggccaggacgcccgcgtgctgcaagtgtcgcgctcgattgaggcgctgttgcgagagagcagctgacgcacggcggttgaatccggggcaggtccaccctgccccgggctcgacacttttcccggtaaaaaaattccacggcggccgcccgtgcgcccgcactcgcctgccaatcgacgtgagcagcccgctgcgcaatgaattgacgagaccccttatgaacccgagcaacgcaacttcaccgacagaactggaccacgcgccgatgaccgacgaagtggcactggtgtatcgcaagatcgcctggcgcctgctgccgttcctggtgtttctgtttgtattggcctggatcgaccgggtcaacgtcggtttcgccaaactggcgatgctgcaggacctgggtttcagcgaggccgtgtatggcctgggcgcagggatcttctttattggctacttcttttttgaagtgcccagcaatctgctcctggagaaaatcggcgcgcggcgcacactggcgcgcatcacgatcatgtggggcctgacgtccattgccatggcgtatgtcgagagtgcctggtcgttctacgtgttgcgctttttgctcggtgcctttgaagcgggcttcttcccgggcgtggtgctgtacctgacctactggtttcccgccgcgcaacgcgccaggatcaacggcatgttcatgacctctttcgcgattgccggcgtggtgggtgggccgctggccgggtttatcatgagccacatggtcggcgtcggcagcctggccaactggcaatggctgttcatcctcgaaggcattccctcggtggtcgcaggctttttggtgctgcgttatctgccggaaaaaccggccaatgccaactggctgagcccggcgcaacgcaagatggtcagcgacaccatcgcccgcgaagaccaggtccccggcaaacacagcgacctgcgcgcgctgatccgttttcccaaactgtggctgtgtgcactggtgtacttctgcctggtcagcggcaacgccaccatcgcattctggaccccgtcggtgatcaaggcgctgggcgtggacgacaccatgcgcatcggcctgctctcgtcgatcccgttcatattgggcaccgcagcgatgctgtggaacggctttcactccgacaaaaccgccgagcgccgcgtgcattgcgccatggccgcactgctcgccgggctggggctgattggcacaggcttgttcatcggcaacgcggttctggccttgatcgccctgaccatcgccgccatgggcatcctcgcggcgttcccggtgttctggtcgattcccggcgccttcctcgccggtaccgccgctgccgggggcatcgccttgatcaactgcatcggcaacctggccgggtttgtggcgccgtacatgatcggctggctcaagaccctgaccggcagcctggcagccgggctttatctggtcgccgcctttgaaatactcgcgggcgtgttgctgctggtggtgttcaaagggattcgtgtggagcgaaataacggccgggcgtgacgccaaaggtgcggcgaaacagcgcgataaatgcactgacgttgtcataacccaactccagggcgacacgggtgaccggcatgccagcggccaaccgctccagtgcgcgcagcagccgtacgcgctggcgccactcggtgaaactgaagccggtctcctgcacaaaacggcgtgtcagcgtgcgcggggcaacgccggcccaggcagcccattcctctaggcggcgctcatcgtccgggcggtccgacaaggcctgggcgattctgcgcaaccgcgcatcccggggcatcggcaagcccagggtggcgcggggcaacgtgcgaatctcatcgagcaacacgccggccaatcgcgtctgcgcgggcgcccagtcgccctccccccaacccgccgtacgcaggacgacttcgcgcaaaagcccggagaccgtcaggatgcacggcgcctcgggcaagccgacacattccgatgccacgacataaacactccagccgcaaaacggcccgtgggaacgcacgccgtgcgcaacacccggcgggatccacaccgcatgcgtggccggcacaacccactggctgtcaccggcgtcgactgaaagcagcccttgagtcgcgcccagcagttgcccgcgcccatggcagtggcgttcggtgatgcgtggttcagcgccctcccggatcacggcaacaatcaacgggccatcggccgaagcggcggtggaaggtgaaatcagtgtcgagggcataaatggctttatcagactatcgaatgtctttaatagcgtaccaaggccaaacttgcacgcctatagtgggtgcctcctaaccctctggagtcaaaaaccatgcgccccgaagatgtgttacctgatgaccagaaccagaccacccgcgatggcgtcgtgattcgcaaaggcagcgtgggcgcctttctggtcaatgccagggcctggtgcgacccacagacagaggcggcgcaacacaaggttgccgagaaagacctgctcgaactgctgccggccttgcgggcattggggttgttcgaggtgttttcaattcgggatgtggcgctgcagcggtgggtagaggagcattgaatgcgcggtgcctttcagcaatcggccttgcggtaacgttctggcaggcaaaaaaaggccactcaactgagtggccatttttttgcctgtcatcgggagatttttttgctggcgacctgcaacaagtcatcggccatcgtctggatcagatcacctctgctgacctttttcagccattcagccggaagccccgccacaccatagtgagcaccggccagttggccaacgatagccgccgtggtatcggcgtcgtccccgaggttggcggccatcaacactgcgtcggcaaaactgcccgtgtgagcaaaacaccagaacgcagcctccagcgacgcgaccgagtagccggaaccggcgatatccgcacgggttttcgcataaaaatctccgcgtgcaatggcgattaccttggcctcggtcagcgcatgagcatccaccgcgagcacctgcgacttcggtgcgccacgcagtgcgttggcaatcgccctgccgagcaccaggcaacactcaatggcttcctgcgccccgtgggtggtacgggagctatcggccaccagcacgtcggtgcgctctgcatcgggaaaaccaaataacaccaccggtgccaggcgcatcagtgagccgttgccggctgcacggcgatcggtcgaaccggccatgggatcaccactcgcttgatacctgcccaaggccgcgcacaccgtcatgccgatatcaaagcattcccccgtcgaactcaggtgccccgactgccaccaccgcacataacgattcatctggtctgcagcgtcaaaaccgcccttttccagcaagctttcagccaggcacaacgccatggaggtatcgtcagtccattgccccgccttcaaattgaacggccctccaccggccatcccggtgacgggagcaaatgagccgcgcggcatgaactcgacagtggtgcctactgcatctccacacgccaggccaagcaggcaaccacggtaacgttcagacagagtaatgggcatcagcgctccttatgacttgggggttccttgcaagaagaaaacctctatacaccagaatgcgccggccttatgtgcctatctccaggccgttaacgtgttgaatcaatattgcttgaaaggtcactccccctgtccgtaacttgatgaaatcaatccgaaatatcagtcaccggaatgctctgatcttccggtgtgtgcacacagcctttcttgtcgcgccggtcattgatccagccgccgacctgcgcggcaaaatcggccggtgatttgcgcccgaccttgcgggccaaatcaagaatggtctgttgggcgagcgcgtcttccatgcgtttctgcgccgtcatcatcgcggcgtggaccgagcaatggccgtccagcgcccaagcgggtggcgcgccgtcaaacaatgcgcaacgcccgcgaatctcacggcaattgaagatgagcttgtgtccatcaatggcgttgacgatatcgagcaggctgatttcgtcagacggcctcgccagcttgaacccgccgcgtacgccttcggtggctaccaccagtttggccttggccagcttggtgaagatcttcccgaggtaatccaggggcacgccttgcaattctgccaggtcacgcacgctcgcctctcggctttcgccgccatcccccaccagaaaaatcaggcaatgaatgccgtattcaacgcctgcgctgtaaagagacatgccaatctccgacttaattagtcgcacaaagtaacaggaaagggtgagtcaagccagtttctcccgcgcagatccgccatcacccagtactgaacctcagtgagtttcgagcctgaatagcaggacttaaccgctgattctcgtgccttcatcccgtggcgtcacaaaaaatcaccttgcatccactaactacgacaaatatagtcgccgttgctgactgacccatcacctcaccccaaggtaaaaaaatgaaacagcacattctggttatcggcgcgggtttcggcggcctgtggacggcgctgagcgcaacgcgcctgttcaatagtcatgaccgcaacgatgtcgacgtgaccgttctggccccgcaggccgagctgcgcatccgcccgcgcttttacgagcctgacgcccatcaactgttcgcgccgcttggcgagctgttcgacgcggtaggcgtgaacttcatcaagggtgcggcagaagcgataaacgtcgaacaaaaaaccgtcgcctacctcgacgcctccggtaaccgtcaggtactcaactacgacaagctcgtcttggccaccggtagccggctcgcagtgcccggcacacaaggcgtggcacaacacgcgttcgatgtggaccagatcgagcaagccgttcgcctggagaaccacctcaaatctctcgcagaccgaccccacagcaagggccgcaataccgtggtggtcgccggcggcggcttcaccggcattgaaacggcaactgaaatgccggcccgcctgcgcgccatcctgggtgaaaacgcagacatcgaagtgatcatcgtggaccgcagcgcaaccatcggcgcgtcgatgggcgccgaaatcggtcggtcgatcgccgaggccagcgaagaactgggcgtgaaatggcagttgaaatcatcggtggtcgccgtcgatgaaaacggcgtcaccctggataatggtcggcatatagaagccagcaccgtgatctggaccaccggcgtgcgcgccagctcgctgaccgaacagatccccggtgagcgtgatgccctcggccgcctgcacgtggatgcaaacctgaaagtcatcggccagcccgacattttcgccaccggtgacgtggcgtacgccgccaccgacgcgctgggtaaccacgcccttatgacctgccagcacgccatcatgctgggccgttacgccggcaacaatgtcgccgcgcaagtgctgggcgtcgagccgacgccctacagccagcccaagtacgtgacctgcctggacctcggcggctggggcgcggtgtacaccgaagggtgggatcgccaggtaaaattgacccgccaggaaggcaaatcgctcaaaacccagatcaacacggtgtggatctacccgccggcggccaaccgtgaggcggcgtgggcggcagcggatccactgatcccgattgcctgacaggcggttaacgagagtggccggtacccttcccggctcactccacagcctcccaatcgacctcggcaaattgctcaaccagaaagttgataaacgcccgcaccttgggcgccagatgcttgcgcgtcggatacaccccatagatgcccagttcgacggactgatagccggggagcaactccaccagatcaccgcgtcgaatgtcctcacccaccatgaagctgggctgcagcagaattccgcctccggcaagggcaaccgaacggcaggtatcgccattgttgcagcgcaggctggcgcgcgtggtcaccacgtgttcccggccgtggcctgtgaagtgccattcgttgccgctggaaaaattgctgtatgccacgacccggtggtccgtcaggtccttgggttcgttcaatggcgggtgttgtgcgaggtaagccggtgacgcacacaagcgcatgcgggtactcgcgatgcgcctgccgaccagtgacgagctttccagccgggcaatccgcaccgcgacgtcatacccctcctccaccaggtccaccaggcggtcattcaagctgatgtccagttcgattttcgggtgcctggcgagaaattcagaccagagcggcgccaagtgcagcacgccaaaactgaccggcgcattgacccgcaacagccccaccggctcgctcgctcccgacgacaccgccaactctgcctgcgccatcaagccaagcacctcgcgggcttgttgatgaaacagacgcccttcttccgtcaaggaaagccgccgggtcgtgcgttgcaacaagcgcacgccaagacgctcttccaacgcgttgacgtgccttgaaaccgccgccttggacatttccagaaactcgaccgcgccgacaaagctgcccttttccaccacggcgcagaacacctgcatttccagggctcggtccataaccatctcactaaacggaacaattagtctgattacagcatatttatccctttcaccgaatcattaaactttggcgttcaccctctcccattacggatcgtcagcatgacaacccctcaaacccagccttacgccgccctcgtgcttcgcctgattctgggcgccatgttcctcgcccacggcttgaccaaactgctggtgtttacgcccgccggtaccgccggcttttttcaatcggtagggtttccggggttcctcgcgtacccggtcatcgctttcgaaatcgctgccggggttctcctggtgttgggtgtctacgcacgctgggtcgcgggcctggccgcggtgcaactgttggtcgcgtccaccgtgcatttcgccaatggctggagcttcaccaacaccaatggcggttgggaatacccggtgtttctggcgttcaccgcactcgcgctggccttgctcggcgatggcgcatgggcactcaagcgctcggcttgagcttgaattgcacagctgaaatcatctgacgaggccatgtatgcacgccccccttcccgcccttttcgtttcccacggggcgccgacgtttgccctcgacccagggttggcgggcgcacgcctgagtcaactgggcaggcaactgcccaagcctcaggccatcgtggtggtctcggcacactggataacgaaccgtgcagtcagcatcacagctggcagtgcaccgcaaaccgtccacgacttcggtggttttcctccagcgctgtatgagctcacctacccggcgcccgggctgccagcgctggccaaccgaatcgcggcactgctggaacacagcaactggcccgccagcctggatacggatcgcggcctggatcacggtgcctgggtaccgttgcggcacctctaccctcaagccgacattccggtgatccaggtgtcgatgccggtctggatgaccccgcaggatgccttgaacctgggtcaggcgttggcgcccttgaggcatgaaggcgtgctgatcatgggttccggcagcctgactcacaacctgtatgagtttcgctccgcgggcgtcaacactgactatgtgcagccgttttgcgactggaccacccgccagctgaaggcgcgcgatactgcgatgcttctggcctacaggacgcaggcgcccgaggcgatgcgggctcatccgagcgaagaacattttttcccgctgttcgtcgccttgggcgctgccggccctgactacgaagtgaatctgatcgagggcggtgtgacctacggcgtgttgtcgatggacagctacctcttcaacgccagcccgcccgataccgcaccgaggaaaacaccatgacttcaagcagcccactgccgcaattgcacacagaccacggcacaggcctgcactatcggcggcgcccggcccacgccacaccccgcgcccggctcgtgctgctgcacggcgtgggaggcaacgagaccaacctggcagggctgatcaacgacctgcccgctgatatcgagctgctcttcgtgcgaggccctttgccgatggggccccagcgctacgcctggtttcaggtcagctttactgacgaaggcccgcgcatcaacgaacctcaggccgaggccagccggcaatcgctcattcagttcgtgcaaaaccagacgcctctgccgaccctcatcgcaggcttcagccagggcggcatcatgagtgcgagcgtggcgctgagcgcgccgcaagcagtagccggattcggcctgctcagcgggcgaatcctgcctgaattgacgcccgtcattgcggctcgggatgagcttgagcaactgtgcgcgtttgtcgcccacggccgaaatgacgaaaagcttcccgtgttttgggccgaacgttccagggaaatgctcaacgccctgggtgtgccttgtcggtatcaggtgtatgacatggcccacgaaatggccgaagaggaaatcgccgactttgtcggctgggtagcgaacaccctttcggcttcatcgcgagcctcatcctgacgccacactcctgctgccgggactaccgcgaatgctcctggaaccagctggcaacgtggccgaccgtacggtcaaccacatccggctgttcgtaatactggaaatgattcgtgccgttttcccagatcagctttttatcggcagttggaatcgaatcaaaatgccgacgggctgccgccgggttcatgcaagtatcggagtgcaccaccagcgccggcttttccagcttggccacgcctggcacggtggtgtagtcgaagtggtccaggtcactcatgatggcgtagcggttttcccagcctttcagcgtccaggggccgtaccagctccagatcaagggccctggcaaccccgcaagcgaccccaactccgcgctgaccagcggctggtacacaacctcgccggttgcttcgtagcgggccttggcttctttcgcacgctcgaggcgggctgcgagcaacgcctccagttgctcggtggtgggagcggtcgcggcatcgaacgggttttcactgacgcccgcggcgagcatgaacagatccgtttcgcggtcgcggtaatacccggtcaccgccgcaacggcgctcactcgagcatcataggaagcgatgtccagcatctcgggaccgccctggcaaatgcccagcaggaacacccgcgagcggtcgatatcctggcgcgtcagcaggtggtcgagtgccgagacaacatcctcgtttttcattttcgggttttccaggcgccgtggcatgccaccactttcgccaacggtgcgcgggtcgaatgccagcgcggcgaacccttcgtctgccagccgagtcgcgtactgggtgggcgcctgctccttggaaaacgaataaggccccaggactacaaccacggggaaaggcccctgccccttgggccggtagagcacgccgaccacgtcgtcgccgtgggagtcgaatgcgatcttttcagccgtgtaattaccgtgagtggacatatttacgcctccagcgtcgtgagttttccgagcttatgggatactcgttgacgcgaatatggccacaatacttgataaatacatgaacaactctcaccagttaaaaggcgtggatttcttcacactggccgtgtttcttgcggcggccaggcaccttaatttccgcgcggcggccgtcgacctggatgtcacgccttcggctgtcagccattcggtgaaggcgctggagcagaaactgggggtgcgcctgttcaaccgaaccacgcgcagtgtgtcgttgaccgatgcgggtgaacggctggccaagaagctgaacccggcgatgtcttcaattgccgatgcgatgcaagaggcggatgacaaccgcgcggtgcccagtggcaccatcaggatcaatgccagtgagggtgccgtgcgcatgatctttcgccccgtgctcgcccgcttcctgcgcgaacacccctcgattcatctggacgtagtgaccgacggcaaactcagcgacatcaccgctgacgggtttgacgccggcatccggctggctgacgccgtgccccaggacatgatcgccatccgtctgacggacgacatccgcttcgctgccgtaggatcacccggctacttctcggcacgcgggcgcccccatacacctcaggatcttgaccagcacgactgcatccgcttccgttttgacagcggcgctatttatcggtgggagtttgaacgccagggccgcaaggccgtgatcaacgtcaacggccctttgacgctgacggatcagccgttcatggtcgaggccgcaatggatggcatcggcatcgccttcgtgcccgagcacctggcccttgaggcactcgcgcacggcaggcttgaacgtgtactggaggactggtgcccaagcatgcccgggctatgcctttattattccgggcaccgtcatgtatcggtggcgcttcgcgcactgatcacggctgtgcgccgcgccgcgccctgaggttgccgcgcggtgatcaacccgacaaatgaaatcaccagcgccaacccaatcgtcgaagacacctcaaagcgatgctcgggcgtcaccagcatcactgtcaatgcggcgcaaatgaaggcgatcaccaaccaggtcagccagggaaacagccacatctgaaaggtcagcgtgacgttgcgacgctttagaaccttgcgcatgcgcagttgcgaaatggcgatcaccaagtacaccagcaaggcaatcgcacctgagctggccagcagaaactggaacaacccggccggcatgaagtaactcagcagcgtcacccccgcccccaggatggtgctggcgatcaccgccgcccggggcacgctggccgccgaggttttcttcatcagcgcaggggcgtctccgcgcttgcccagggaaaacagcatgcgtgaagcaatatagatggaggagttcatgcaactggccacggcgatcaacaccaccccgtcaaccaacagcttggcgtggggaatgttcatcagttccaaggcgcgctgataagacccgaccgaggccaacaacgggtcgtcccacggcaccacggaaatcaccacgaagatcgacaacaggtaaaacacgccgatgcgccacatcaccgaacgcgtggcccgggcgatgttctgcgccgggttgctcgactcggccgccgcgatggtgaccgcctcggtgccgataaaactgaacatgatggtgatgaaagcacccaccactgccgacagcccgttcggtgcaaaaccaccatgctgctccatcaaacggcttaaaccgcccgcctctcgctcgggaacccagcccatcaacacggcaaagcccaggccgataaaaccgatgatcgcgatgaccttggccatggcaaaccagaactcgaattcaccgtatttggaaacgctgaacaggttggtgaccaccaacaaaaagatcgacaacaaggcaaacagccaggcgtcgatctgcgggaaccactggttgaggatatgccctgcggccagggcttcgatgggaatcaccaacacccagaaccaccagtacagccagccaatggtgaacccggcccaacggccaatggcctggtcggcgtaggttgaaaatgagccggtgtcggggttggccacggccatctcgccgagcatgcgcatgaccagcaccaccagcaggcccgagaacagataggccagcagcaccgcgggccctgccgccgcaatcgcgtgcccggaaccgacaaacaaccccgccccgataatccccgcgatggacagcatggtcacatggcgcggtttgaaaccttgcgccaactgggcgtttgaatcattggaattcaggctatccattgttttcttattctcggtgatcgacgtcagggcgtactgactaaggcgtcaggcgatcatcatttcctaatgatgggtcaccttacgcggcatgacttcacggaaaacagcctgaaaacggcaggcattggcctgatatcgacatagcttgctgcacgggcgccaacggttggatgtgaaccggcacctatttgtggtgcggtgtgcggctcagcgggtcgccacagacggcggtgccacagggttccaaccaccgccgagcgccttgaacgcagcgactgcggcccgtgccgcttcggtttgtgcctgggcccgggcatcggcggtttgcagcagactcgcctcggcgtacagcacctcgatctggctcgctgcgccgtgccggtaagcagcggacgaggactccaccgcccgcgaaagcgatgcttcgccctgcaccagtgtgccggcctgctcctggtgccgggccagggatgaaaatgcgttctcaacatcctcagtggcacgcagtgcggcgaggcggtaggcggccaaggcttcggcgtcccggcctttggcgagattgatctgcgcatcgatgcggccgaaatcaaacagccgccagcgcagccccagcacaccggccgactggcttgcaccaccggtaaacaggttgccactggaaatcgccgtggcgctgcccagcaaaccgtcgagggagaatttcgggtagtactcggcaatcgctgcgccgattctggcgttggcggccatcagccggcgctcggccacgatcaggtccgggcggcgctggagcaggtcggcaggcgagccggttttagtgatgggtgccgcaatcggaatcgaccttgcggcttcaagctctgcgcgatgggttccgggggtagcccccagcatcacatccagcgcgttcatggccgtctcaaggccgttttgcagaacgggcactgtcgctttgacttgcaacagcgcgccctcggcttggcgcacctcatactcggcggccagcccttttgcatataacagtccggttttcgccaagagcccctgctgggcctcgacctggcgccgggctatctccaaccgcgcctgcaagccacgaatggcgatataggtgtccgccgtctgcgccgccaccgccagcctgaccgccgccaaaccggcttgcgagccctggtagtcagctagcgcggcttcgcggtcacgccgcaggccgccgaacacatccacttcccaacttgccgtcaggtcagcttcataggcactgcccgagcggttatacccggggctggcatccagcaattgccccagtggcgtttctaccgactgatgggcgcgcgcggcggaaccgctgactgcgcccgagggcagcaaggcagcgttcgccgcccccagcccggccctggcttgcagcacccgcgccgaggcttgtgccaaatcgaggttctgcgccagcgctgtttgcacgaactgcgtcaacagcgggtcgctgaaggtctgccaccaggtcgcaagcgctgctgcgctttgggcgtcatgtcctgccgactgctccaggtagtggttcgagagcggcaggtcggggcgccgatagtccgggccaaccgcgcaaccggcaagaagactggcacccaacacgagtgcgaaagaatgacggggggacatggctatcctgcacagtgggcaaactagtgaccatattacgatatggtcactcgttgtcaacacggttcaatggcggtagcctaaccggcatgaccaagacatcccttcccgccccaacaccgcctcgcggcccctctgatcacgacgtcagcgtccagatcgtcgaggcggccagccagcatttcggcctttacggctacgaaaaaaccaccgtatccgacctggccaaggccatcggtttctccaaggcctacatctacaagttctttgattccaaacaagccattggcgaagtgatctgttcaaaccgcctgaacatgatcaaacagattgtcgacgaggccatcgccgatgcgccctcagcttcggaaaggctgcgccgcatgttcaaggcgctggtggacgccagccgcgacctgttctttcatgaccgcaagctctacgacatcgctgccacgtccgccggggaagcctggccttcctcggtcgcttatgaggcgcatatccgcagcctgatcgcccaaaccatccgtgaagggcgtgaagccggcgagtttgagcgcaagaccccgctggacgaggtcagcaatgtgatttacctgaccatgcgcccctacgtcacgcccctgttgctgcaatacaacctcgacaatgccgaggaagccacccttcaactttccagtttgatattgcgaagcctcgccccctgattttcattttagtgaccattgactaaattggtcacaagtataagctgtggatcctgctccctaggaaagcgatcccatgcttgcgcgaaaattaccctcgttggccctctgcgtactgccgcttgcgctggcagcctgcagcgacgaacacccccctgctgacccgcgaatcgacccgccgctggtcagggtcagcgctgttcaacccgcctcggtcgcctcgcgttcattcaccggcacggttgccgcccgcgtccagagcgacctgggtttccgtgtatcaggcaaggtgctggaacggctggtcgacaccgggcaagcggtcaagcgcgggcaacccctcatgcgcctggaccccatcgacctgcaactgcaggcacgcgcccagcaggaggcggtcagcgccgctcgctcgagtgcccggcaaacggccgatgatgaagcgcgttacagggacctcgtcgctgcgggcgccgtgtccgcctcggcttatgatcggataaaggcgtcggccgactcggccagggctcaactcagcgcggcagaagcccaggccaacgtcgcgaaaaacgcatcgggttacgctgttctgctggcggatgccgacggtgtggtggtggacacgctcgccgagccagggcaggtggtcagcgccgggcagccagtggtgttgctggcacgggccgggcagcgcgaagtcatcgtgaacctgccggaaaccctgcgcccggccatcgggtcggtggcgcaagcccggttgtacggcagcgcgcaaacctccgtgccggcaaagctgcgccagctgtccgatgcggctgaccgtgccacacgcacctttgaggccaggtacatactcgaaggtgcgctcgccagcgccccgctgggcgccaccgtggcggtcgacattcagggcgatgccacccccgcgcaaaccctgcaagtgcccctcggtgcactgttcgatccgggcaacggcgcaggggtctgggtggtcgatggcaacgctgcgaaggtgacgtggcggcccgtgcaggtagtggggctgggtgacgacagcgcacaggtgaaaggcgacctcaagcccgacgaacacgtggtctccctcggcgcccacctgctgcatgaaggcgaggcggtcaggctgccggatcaaggcggcatcgctggagttcagccatgaagcagagtcgcttcaacctctctgcgctggcggtccgcgaacgttccatcacgctgtttctgatcgtgttgatttccatcgccggcgtgcttgccttcctcaagcttgggcgagccgaagacccgcccttcaccgtcaaacagatgaccgtggtcaccgcctggcctggtgcgaccgcccaggaaatgcaggatcaagtcgccgagcccctggagaaacgcctgcaggaactgcgctggtacgaccgcgccgaaacctacacgcgcccgggcctggcctttaccgtgatttacctgctcgacagcacgccgccttccgaagtcgagggagagttctatcaggcgcgcaagaaactgggcgacgaaaccaaaaacctgccacccggcgtcatggcccccattctcaatgacgaatattcggacgtcacctttgcgttgtttgccctgaaggccaaaggcgaaccgcagcgcctgctggtgcgcgacgctgaagccttgcgccagcaactgctacatgtgccaggcgtaaagaagatcaacatcattggcgagcaggccgaacgcattttcgtgtcgttctcccatgaccgcctcgcgaccttgggcatcgcgccccaggacatctttaccgcgctcaacagccagaatgtactgacaccggccgggtccatcgaaacccgggggccgcaggtgtttctgcgcctggacggtgcgctcgacaagctggagaagatccgtgagacccccgtcaccgtaaaaggccgaacgctgaagctttcagacctggcgacggttgagcgtggctacgaagacccggccacctttcaagtgcgcaacaacggtgagcctgcgttgctgctgggggtggtgatgcgcgagggctggaacgggctggaccttggcaaggcgctcgacgccgagaccgcgaaaatcagcgccaccctgcccctgggcatgacgctgagcaaagtgacggaccaatccgccaacatccattcggcggtcgatgaattcatggtcaagttcttcgtcgcgctgtttgtggtgatggtggtgtgtttcatcagcatgggctggcgtgtcggcatcgtcgtggcagcggccgttccgctgaccctcgcagcggtgttcgtggtgatggccgccaccggtaaaagctttgaccgtatcaccttgggctcgctgattctggcgttgggcctgttggtggacgacgccatcatcgccatagaaatgatggtggtgaagatggaagaaggccatagtcgcctcaaggcctcggcctacgcctggagccacaccgccgcccccatgctggccggcacgctggtcaccgccatcgggttcatgcccaacgggtttgcccactcaacggcgggcgagtacaccagcaacatgttctggatcgtcggcattgcgctggtcacttcctgggtggtggcggtggtgttcacaccctacctcggggtgaagatgctgccggacatcaagcaggtggaaggcggccatacggccctttacaacacccgccactacaaccggtttcgccgggtgctggcgcgcatcatcgccagaaaatggtgggtggccggtggcgtggtggggttattcgccctggcgattgtgggcatggggcacgtcaaacagcagttctttcccacctccgaccgtcccgaagtgctggtggaagtgcagatgccgtatggaacgtcgattgcgcagaccgctgccgctaccgtgaaaatcgaagactggttgaagaaacaacccgaggcaaaaatcgtcacgtcctacatcggccagggcgctccgcgtttttatctggcgatggcgccggaactgcccgacccctcgttcgccaaggtcgtggtgctcacgggcagtgaggaagagcgcgacacactcaagctcaaactgcgccaggctgccgctgacggcttggcgtccgaagcgcgtgtgcgcgtgacccagctcgtgttcggcccgtattcgccctttcccgtggcctaccgcgtcatggggccagacccgcagaaactgcgcgccattgcggctcaagccgaggcgatcctgcgcgccagcccgatgatgcgaaccgtcaataccgatggagggcccagcgtaccggccctgcacttcaccctcgaccaggaccggctccaggccgtgggcctgacctccagctcggtcgcattgcagctgcaattcctgctgacgggcgtaccgctgaccgcagtgcgcgaagacatccgctcggtacaaatcatggcgcgttcggcaggcgacacgcggcttgaccccgccagaattgccggctttaccctcacaggtgcggccgggcaacgcgtgccgctgtcccaggtgggcacggtcgatgtgcgcatggaagcgcccgtgctgcggcgccgcgaccgtacgcccaccctcacggtacgcggggacattgccgagggcttgcagccgccggaggtctcggtcgccatgttgaaacagctgcaaccgctcatcgaccagttgccggccggttaccggatcgagcaagccggcgccatcgaggagtccggcaaggccacccgggccatggcgccgctgttcccgatcatgattgcactcaccctgctgatcattattgtgcaagtgcgttccattgccgccatggtgatggtcttcgccaccagccccctcggcctgattggcgtggtgccgaccctgctcctgttccagcagcctttcggcattaacgcgctggtcggcctggtcgcgctgtccggcattttgatgcgtaacacgctgatcctcatcgggcagattcacaacaatcaacaggaggggctgacgccgtttgatgcggtggtggaagccaccgtgcaacgtgcccggcctgtgttgctgaccgccgtggcggccattctggcgttcattccgctgacccactcggtgttctggggaaccctggcgtacaccctgatcggcggcacgttcggcggcacgctgatgaccctggtctttctcccggccatgtattcgatctggttcaagatcaagcccgccactcccccatcaacttctgcacctgaaaacacccaaccgctaaccatcaccccctagcaggagaagcaccatgcacatcaaagattccattgcgctcgttaccggagcaaaccgtggtttgggcaaggcttacgtcaaggcactgctgaatgccggggcgaaaaaagtgtatgccgccgcccgcgacattggcagcatcgaggctgcccccggggttgtgccgctgaagctggatgtcaccaagacggaagatatcgaggcggcaatcgccctggccaaagacgtcaccctgctgatcaacaacgccggcatcaacgggcgcaatggcccatccgccggcaccattgatatcgacacgctgcgcctggaaatcgagacaaacgccatcggcccgctggccaccagcctcgccttcgcaccgatcctggccgccaacggtggcggcgcgatcgtcaacatgcattcggccctcagctggatcaacctgcctaacaccattacttattccgccagtaaagcggcggtctggtcgctgaccaacggcttgcgcctgcagcttgccagccggggaaccttggtggtcggtgttcatgtggccttcgttgataccgacatgacacgtgggctggaaggtgttccgaaggcggatgccgatgaggtcgtgtcgcgcgtcttgagtggcatcgagaaagacgaaacagaagtgctggccgatggaaccgcccaggccatcaagcaaaacctgagcaacgggatttacctgcggcctgtcgcctgatcgctcagcgcgcgcccggcgggaacactccggccgggctcgcctgaaatgccgtgcccttttaatgtatgagagctgtatgactatgacgacccgccacgattcaagtgcgctcacggcagacgccggggaaagccccctccccgtgccttcgcacgcacagtctgccgccaagctgcgagcccgcgaagcgatgctgcatggccccctgtttgccacgatgatggccttggctctgcccaccatcggtgtactcgtcgcccagacactggtgaacgtggccgagaccttttacgtttcgcgcctgggcgccgacgccctgatcggtgtcgccctggtctttcccgtgtggatgctcatgaccatgatgtctgccggcggtattggcggtggcgtcgcttcagccgtcgcgcgggcaaccggcgccgggcgccatgaagacgcaaacgcgcttgtgctgcacacgctggtgaccgccgtggtcttcggcttgttgttctcggtgctggtgattggcctgggcggcccgctgtatcgggcgttggggggaacgggcgaagccctgcattcagccctcgtctattccgcttttatcttcctggccgccgtgccgatctgggtggtcaacctgctatcagccgtccttcgcgccattggcaacgtgcgggttccggcacggatcacctttgccggcgtggccgtgctgatcccgctttcgcccttgctgatctttggcctcgggccatttcaaggcttcggcgtggccggcgccggcatcgccgtcacgctttactactgcggcgcggccatcgtgatgctgcgctacatggccagcgggcaatccgggctgcgcctgtctcgcggtcgcctgcgctggtcattgttccgcgacattctgacggtcggcctgcccgccgcgctcaataccctccagttaaacctgatggtcttgctggtgaccgccgccgtcggccgcttcggtgtggatgcgattggcggctacggcaccgcctcgcggctcgactatgtgctggtcccgattctgttcgggctcggaacggccgtgctgaccatggtcggcaccaacgtcggcgccggccaactcgaacgcgcgaaaaaaattgcctggctcggcaccctcgtcagcgtaggtttcaccgagaccgtcggcctgctcgtcgcgctgctgccctggctgtggatcgggctgttttcccatgacagcgctgtcgtggagaccggctcacagtatttccatatcgttgcgcccttctacgccgccaacggcgtgatcttcgcactcagcttcgcggcccagggcaccggccggatgggctggattttctttgccggcgccgtccggctggtcatcgccgcaggtggcgggtggctggcggtgacggtgttcggcgtgaccacggccgggctgtttgccatcgttgcgctggctttggtcgttgcagctggcatgtgtggcggggcgatgtatttcggcgggatgtggccgtctaccagcaaacgcagggtttgaacaccaaggagtgaaggacggctatttacgtctacggcgtttgcgtatggcccccgcacatcggcgacctcccggtagcaaccggcaaggtcacgcaccgggcagtctcaaggcactcggcgtttttcttgatgagaacgcaatgtaatctgcagctaagatatacgccggttttcgctattcaaggattttttgcgaatgagtaaaggtatcaagatgcggtcggccctggatgatgccaaccgccaacaatcactccaatccctgcaacaactggccgacaccgggcaaccaatccccacactcaggtgcgacggaaaaaactgcctgacgccggtgcggttcgtgcctcaacgcttggacccgaataaagagaacgccgtgagagccgcttatatagggttgaagtcttccgcagcgtcagatcacaccgccacctgtgattacaacgccctcgcgcaattgaacagcattctggctcagtcagaccgcaactttatcaaggcactgaatgcgggagcatcagaactccgcctgttgttaatgcataacaaactcggaggggtgaatcagccacaaggctcggcacccgcgtcagccgccgggggcagcccggcgaaaggcaattcaaacaactaccgacccagcgcgatgcagctgaacagctacctgcgaacaacggctgacattctcaaactgcgtgagcgttgtgaagaagatgaccttcttcaaacgactctggtgttgagttttggcaataaaaaaatcagttggagcgaattttacttcgaacacggtcgttacgaagacgcatgggcgatggcggacagtcgaaaggatgcttgccaccccttcgcaatcatggggacagtggaacagtttcgaccgcctgccgccgacgcacaatacccgacgggatggctggatctgcatacagaacgcaacaagccgaacgcaaacaataccgcgaacacgtattcaatcaacgtgggtgacaaaaactgggcttggttaagtctgatcccagcgggctccaagatcattgtgtttggcgtctggaaagttacaccgcccaagaaaagcctctataacgtgcccagcgatccaccgagagagatcacctacttcaaccatacattaaccctctaccccaaatttcacgcacagctattggtgatttagtggctgatcggtttcctggaataaccgtgtgatctctggctcgcccggcgacgattcgctgggcaccgcagctgcactttctggagccccccttgaatgcgaactcaagcatttgcgcgctcttgtgattgttcgcactgcaattgctcggttttgagccatttatcgcagaaaagaaaaaggacgccaaagcgtccaaaccttaaatttcaggcaaaaaaaagccactcgctagagtggctttttctttgtgtttggagcgggaaacgagactcgaactcgcgaccccgaccttggcaaggtcgtgctctaccaactgagctattcccgcgtcttggtgatgcgcattctatagaattatcagaacccgtcaaccccttgattcaaaaaacttttatttcttttcaacggtggtgcgcaggtgtggccaggcggcgcgcaaatactggagcatggaccacagggtcaggcccgcggcgatgagcagcaaggcgtagcccagcaatacccagaaggagaagtccgacgggttggccagcaggatcaccagcgcaagcatttgcgcggccgttttccatttacccatgttggaaacggctacatgggcacgggcgccgatttcggccatccattcgcgcagggccgagacgacgatctcacgaccgatgatcaccgcagccggcaaggtcagccacaggttaccgtgctcctgcaccagcaggaccagggccaccgccaccatgagcttgtcggccactgggtcaaggaacgcaccaaagggcgtgctttgctccagacggcgcgccaggtagccatcaagccagtcggttgcagccgcaaaagcaaatactgaactggaggccgcatagctccattcgtagggcaaataaaacaacaaaatgaaaatagggatgagcaggacgcgtagtacggtgatcagattagggatattcatcggcacaactggctacgaggtggaaaggcattctattcgctgtgcagatttgcataaatcaactcagcgagctttttactgataccgggtgctttggctatttcgtcaatgctggcacgggatagctcttgcaagccaccaaaatgtttaagcaaatcgcgacgccgcgtcgggccaacacctgccaccccttccagggtggaggttcgccgggttttgccacggcgggctcggtggccggtaatggcaaaacggtgggcttcgtcgcggatctgctggatcaaatgcaacgcaggtgagtcgcctttcaaggtgaactcatgggcggcatcattcaagtacaacgtctcgaaaccggctttacgcgtggcacccttggccacgccgagcaggatcaggtcgggcacggccagttcgttgagtacgtcacgggccatggacagctggcccttgccgccgtccaccaataggatatcgggcagcttgccctccccgtctttcaacttgctgaaacgccgcgtcagcgcctgatgcatggcggcgtagtcatcgccggcggtgacgccttcgatgttatagcgccgataatcagacttgatcggcccttctggcccgaataccacacaggacgccaccgtggcctcgccgctggagtggctgatgtcatagcactccaggcgctgcggcggctcgtcgaggttgaggacttcggccagtgcatcgaaacgcgcggcaacatgttgtcgattcgccaggcgcgcaccgagagcctgttcggcgttggtcaccgccagttgttgccagcgcgcacgggtgccacgcacgcggtggctgatgtccagctcgcggccgcgcagttcatggatggcctcgatcagtgtcgggaagtcttcgtgcacaacgttcacgatcaactccgaaggcaggtcgcgctctgggctgctgacgtagtactggccaagaaatgcagccatgacttcagccacttcctcatcgataccggtctgcgggaagaagttcttgctgcccagcacgcgcccgccacgcacgctgatcaagtgcacgcaggcgccgcccggattgacgaaggcagcgatcacatcgacgtcaccggtaccgccttccatgctctgctggtcctgaacgcggcgcagcagcgaaatctggtcgcgcaattcagcggcacgctcaaaatccagagtgccggccgcttgctccatggcgccggagagttcgtcagtgagcgcattgctgcgtccttcaaggaacatcaccgaatggcgtacatcttcggcgtactccgccggttcaaccaaccccacgcaaggcgccttgcagcgcttgatctggtactgcaggcaggggcgcgtgcggtttttgtaaaagctatcttcgcactggcgcacaaaaaaggttttttgcagcaggctcaggctttcgcgaatcgcgccagcgctggggtacggcccgaaatacttgcccttggccttctttgccccccggtgaatgctcaggcgcgggaaactgccgtcagataaaaacacgtaggggtaggatttatcgtcacgcagcaggatgttgtagggcggccgccattccttgatcagcgtctgctcaagcagcagcgcctcggtctcgttggcggtgatggtggtctcgacctgcgcgatacgcgcgaccagggccgcggttttcggcgccaggccggtcttgcgaaagtagctcgccaggcggtttttcaggtttttggctttgccgacataaagcaggcgtgcctcgctgtcgaacatgcggtacacgccggggcggccactgcaggttgagaggaaggcacttggatcaaacggtgtggtcatgtcaggcgctggcgtccaccatgccgtggcgcaccgcgagcagggtcaattcaacatcactgctgatggcaagcttctcgaaaatgcgatagcggtaggtgttgacggtcttgggcgacaggcacagcttgtcggaaatcgtctggactttctggcagccgacgatcatcagggcgatctggatttcccgctccgacaacgcatcgaacggcgagtcgctggtgggctggaaggatttgatggccaactgctgggcgatttgcgggctgatgtaacgctggccggcaaacaccaggcggatagcttgcaccatttcggccaggcctgcgcccttggtcaggtagcccgccgcaccggcttgcagcaaacgcgtgggaaaggggtcttcctcgcacacggtgaccaccacgactttgatgtccggatggctgcgcaacaatttggtcgtggcaccaagaccgccaatcccgggcatcttgacgtccatcaacaccacatcgggcttcaactcccgtgccttgatcagggactcctcccctgattcggcctggccgactacttgcaggccatcgatgtcagccagcattcgtgtaatgcctgtacgaacgagatcgtgatcatcgactactagcaccctaatcaagcagacacctcgcgatatggtcttataggttgctgaacaccttagcaaaaaaccagggcgcagacctagctgcaagcgtcatatatatagagtttgcacacacattaagccctcatggctcggccggctgcacaattatgctgagcaaaaggtcagctttgcggctgtaccggcttgaagcgagtcgtttaccgcacctgacccgcacgacagtcaagctgcatgcgccagaaacaatcctcctccccgacaatggtcatgccttggcgctgatacagccttctggccggattggtcttgaacaccgtcagtcgcagcaggccttgcgcctgcgccttgagcgccatctgctgtaacacccaactgccggcgccctgcctgcgacaggtttcaatcatgtgcaactcacgaatatagagcgcccggctatcgaaactcaggctgataaagcccatcacgacgtcatcattgcagatcaaccagttctcgcgccccccccagccgacatcaaagccattgtcggaccacaacaaaccgtactgcaggtagtagccgctcatggcttgataggtcagttcccgggcgaacagacggtcgttgtcagtcgccgcgcgcaggtgaaaggccatctcagagggctaccacgtgaccagcccagtgcccgccctcacgacgagccaggaccagcgcatcgccaacgccgggcacggcagccagcaaactgccatcgtttgcccagattgcactgcggcctgcgcagttccagccgccggaggcgccaccgtggttggccatcaacaccagcaaaccatgctcggcggcgtacccctggagcaacgcgctgtctgccgcataaccgccttcgctgatcaacacgcctgcggcgtagacagtggcccccgcctcagcggcctgacgcggatgactggcgtgggaaaagtctgcacacaccgccagggcaatccggtcatccgcccagtcgagtgccacaccgccctgccccgcgacaaacgccacctcttcgcccggatgaaggtgtttcttggtgtaaacacccaatgagccatctgcccccaacaccaatgcgccgatcaacacacccgactcgggcgccagccggatcggcatccccaccaccgccgtcaatcgcagttcccgagccatttcacgaagcggtgccagcagcgcatcgtccggcgcaatggccagctcggccgccaacgaaggctcatacccggtcaacgacaactcaggaaataccagccattgcacaccctgctcagccgccgcctgtatgaacgccaggtgccgctggatattggcctgtacgtcgccagcgatggaaatggtttgagcggcagcaagggtcaaggcagtcatggtcgcgtccaggcaatcattatcggtgtcctctcagcatatctcggccgatagacatggctagcccccggcaatagaaattactgattgaatcctcccatgcgcctctagtaagctccccccatcatttggagacacaccatgttgcaactcacccacactcaggtttgccctgccgccagcgccccgcgctcggtgtcggctgcccgtgtaagcggtttgagcgcacctgccagtttttattttgggtattggtttagccactggcgcgcctgatacctgaaatcggcgcccactactcaaggggtcgcctgccagagaaatctaacccccggtcggctccccgaccgggggttttgtttttcaggccccaccactttcggaacacttaagggaattacgacatgaactacgccacctattaccgctacgacacttgcactgcctggcgatttagcaagctccgttcgggacagcctgccgcctccgatcggtcacctattggtggcaagccaacacacacagccaatacggccaattgtcgaacaccccagtagggccgagcgcgggaatcgcccgccgctcgcccaggaagccttgaatatgaactctgccaccgccgctctgcctgtttcgaacctcaacagcgccaatgaagccctgacccagcgcctgcccagctcccttgagctcaagcaccaactgcctctgagcccgttcctcaacgagcagatccacgcccaccgccaagccgtgcgcgccatcctcaacggtgaagactcccgtttattggtgattgtcggtccgtgctcgatccacgaccccgaatcggccatggaatacgcgcgcaacctgaagaagctggccctggaagtcagcgaccagatgctgctggtgatccgcgcctacgtcgaaaaaccgcgcaccaccatcggctggaaaggcctggcctacgacccgcacctggacggcagcgatgacatggccgccggcctcacgctgtcgcgccaactgatgcgtgaaatgctgcgcctgggcctgccggtcgccaccgagctgctgcaacccatggccgccggctacttcgacgacctgctcagttgggtcgcgattggcgcacgcaccaccgaatcgcagatccaccgcgaaatggccagcggcctgggcatgcccgtcggtttcaagaacggcaccgacggcggcgtggcgattgcctgtgacgcgatgcgctcggcgtcacacccgcaccgccacttcggtgtcgacagccaaggccacccggcgatcatccagactccgggcaaccccgacactcacctggtactgcgcggcggccaccgtgggccgaactacgatgcgcacagcgtggcgcaggtgaagcacgacctggccaagtccaaagtggcgccgcgcatcatggtcgattgcagccatgccaacagcggcaaggacccgctgcgtcagccggcggtgttcaacgaggtgctggagcaacgcctgcagggtgatacatcgctgatcggcatgatgcttgaaagccacctgttcgaaggctgccagccgctgagcccgtcgatgaaatacggcgtgtcggtcaccgacggttgcctgggctgggacggcaccgagcagttgttgcgcagtgcggccgagcggttgcgcgaacagcactgattcttcaggcatgtgaaggtcaaaatgtgggagctggcttgcctgcgatagcggtacatcagctaaagatttgtagcctgacacactgctatcgcaggcaagccagctcccacatttaagactcattggattcaggacaggggatagagcgcctcatcaaactgctcaagcctcggaaacaccaaaggctgctcatccgccagcccttgcagccgctgttcatactccaccagaaagccctgccgcgcctcggcactgatatacggcacatgccacgccacaaacggcgccagcacgtcataccccacatacgccagcgtgccgcgcagaatcggccgcagcatatcttccagtggcccgtgaattgcgccctcgccaaacatatgctcgcgcccgccaagggtcacgctgaccagcgcccgtttgccggccaggccgccctgatcgtagaaccgcttgccgccgtaacacacgcctgaaaccagcacccggtcgatccagcccttgagcatcgccggtgccgaaaaccagaagatcggaaagttgaggatcagcagatcggcccacagcaccttgtccaactcagactggatatccgccgcaatcgactgcttcttcactcccagccgttgctccagggcatacaccagataatcggggttttcccgtactgaaaaatccgccgccgacgccaccgggttccactgcatggcgtacagatcactcacctgcacttcatgcccctgggcctgcagcgtggcaaccgccttgtcacgcaacgcggcggtaaacgactgtggctcaggatgggcgtgaacaatcaaaaccttcatatgaaatcctcaaacggtgtgcgccgcccgttgggccagcaaatggtcgagccagtccgggtccatttccggttccgatgaaaacagcaggccggtgtagtcctgatacggcggggtgaaaatcgcgctgcggctgccctggtccaccacccgcccgcgctgcatcaccaccacctcatcggcgatggcgcgcacggtggcgacatcgtgggtgataaacaggtaggccacacccaactgctgctggatacggttaagcagtttcagcacgccttcggccaccaactggtcaagggccgaggtgacttcgtcgcagatgatcaactgcgggtcggctgccagggcgcgggcaatgcagatacgctgcttctgcccgccggacagttcgcgcggctggcgctccatgaacactgccgggtccaactcgatcatctccagcaactcggccacccgcgcacgcatagccttgcccttgaggcccaggtaaaacgtcagcgggcggccgatgatgtcgacgatgcgctggcgcgggttcagtgccgtatcgggtatctgatagatcatctggatgcgccgcaattgctccttgctgcgccgccgaaaatccaccggcagcgcctcgccgtcatacaacacctgccccgccgtggccggcagcagcccggtgatcaggcgcgcggtcgagcttttgccgctgccggactcgccaatcaccgccagggtctggccgcgatacagcttcatcgacacgtcatgcaataccggctggtgcccatagctggcacttacctggcgtacctccagcaacggcacctcctgcaccgggcacgccttgggctcggtgcgaaaactgcgcaccgcccacagggatttggtgtagtcctgctgtggctggctgagcatgctgcgggtatcggcctcctctaccagcttgccgtggcgcagcaccatgatgcggtcggccatttgcgcgaccaccgccaggtcgtggctgatatacagcgcggcactgccgaaggtttttactgcatcacgaatcgccgccagcacttcgatctgggtggtgacatcgagggcggttgtgggttcgtcgaagatgatcaggtcaggatgacaggccatcgccatcgccgtcatcacccgctgcaactgcccgccggagacttgatggggataacgctggccgatggtttccgggttcggcaaacgcaacacgcggtacaactccaccgcctcgcgctcggcctcggcgcggctgatgccgccgttgatcaccgcggtttccacatgctggtcgatcagacgatgcgccgggttgaaagaagccgccgcgctttgcgccacataggcaatgcgcaggccgcgcaatttgcgcagcgcctcgggcttggcttgcagcaactggatgccgtcaaaacacaccgaccccccggtgatgcggcaaccgtcccgcgcgtagcccatggccgccagcccaagggtggatttgcccgcgccggactcgccgatcaaccccagcacttcgccacgctgcaaggtcaggtcgatgcccttgatcagcggatgccaggcctcttcgtaatgcccttcgatctgcaggttgcggatttccagcaatggcgtgcccatcctcaacactcctttaggccgctggatgtatgcagcatccagtcgacgacaaaattcacgctgacggtgatcagcgccaccgccaatgccggcagcaacgggctgatatcgccgaaggtgatcaacaccgcgttgtcgcgcaccatgctgccccagtcggcagtgggcggttgaatgcccaggccgaggaacgacagcgcgctgataaacaggaacacgaaacagaaacgcaggccgaattcggcaatcaacggcgcggcggcattgggcagcacttcgcgggtgaccagccaccacaggccttcaccgcgcaggcgtgcggcctcgacgaaatcctgcaccaccacggtcatcgccacggcgcgggccaggcggaacacccgcgtcgaatccagcagggcaatcaccagcaccagcgacgtcgcgttggtgcccaccacgctgaggatcaacagggcaaaaatcagctgcggaattgccatcagcacatccactacccgcgacaggccctgatcgatccagccgcccttgatcgccgccaccagaccactcaagcccccgagcacaaacgccagggtggtggtcaaaaaggcaatgcccaacgtgttgcgcgcgccgtagatcaaacggctgaacatatcgcggcccaggttatcggtacccagcaggaactgaccgctccaaggcgcaaagccctcgcccactacttgggtttcgccatagggcgccagcaacggcgcaaacagcgccacggcgatgtacaacagaataatcagcaggccgaaccgggcgctcaacggcgccttggccaagtgggtcaacaggctcatgggctaccccttcggatgcatcaggcgtgggttgctggcgatggacagcacgtccgcaccggtgttgagcaggatgtaggtggcggcaaacaccagactgcacgcctgtaccaccggaatgtcacgtttggacaccgagtccaccagcagttggcctaggcccgggtagacgaacaccacctcgactaccaccacgccgaccaccaggtacgccaggttcagcgcgaccacattgacgatcggcgccaaggcattgggcagcgcgtggcgccagataatccgcgactggctgatgcccttgagccgtgccatttcgatatacgggctggccagcaggttgatcagggacgcgcgggtcatgcgcatcatctgcgcgatcaccaccaggctcagggtcgccaccggtaataccgaacgctccaggatcgtgccgaatgacgcatccggcgccaggttggacaaactgggaaaccacgcgagcttcaccgagaacagcaaaatcagcaggtaagcgacaaagaactccgggaacgacaccgcgctcagcgccgaagtattgagcaggcggtcgaacccgctgttgcggtatagcgccgccagcatgcccaacaccaaagcggtcggtaccgacaccagcgcggccaatgccgccaggcgcagcgtgttacccaaacgcgcgccgatcaggtcggcgataggccgctggttggccagcgacacgcccaggtcaccctgcaacaggcgcagcagccattgcacaaagcgcgtgagcggcggcaaatccagacccagttgcgtacgaaacgccgccacggtttgcggcgtggcggactggccgagcatggcctgggcgatatcgccgggcagcatgccgacggcgaggaagatgatcaccgagacggcgaacagtgagagcaggccgagggcgaggcgctgcaggaccagtttcaacaaactattcatggacgattctcatgaggtaaacccgctcgtcgagacaacatctatcccatgtgggagctggcttgcctgcgatagcagtgtgtcaggctaaaaatctgtagctgatgtaccgccatcgcaggcaagccagctcccacatgggatattcattggctggaaggtctctacgcctgccaccaccgctcaatcaatctcaacccatcgagctcgccatagggcgcggtcagaggcccatgggccacgcggttcgaacgcgccgccaccgaactggcaaacagcggcacaatcgcgccgccgtcgtcgcggcacagcgcctgcatttcgttgtacatctcctgccgcaagggtgcgttcatctcgccgcgggcagcggtcagcagttgattgaaacgcgcattgtcccaatgggtttcgttccaggccgcgcctttggcgtagccgatgctgaacatgcggtcggcggtcaggctgctgtaccagaatgaggtggtgaacggctgcttcatccacacattggagaagaaaccgtcggcgggctcgcgcaccacgtcgatgtcgataccggcctggcgtgcctgttccttgaacaacaccgacgcatccaccgcaccggtgtaggcggcatcggacgcttgcaagcgcaccttgagcgtctccacgccggccttgcgcaggtagaagcgcgacttgtccgggtcgtaggcgcgttgctccagggccgcgttgataaaacggctgccgggctggatcgggtggtcgttgcccaccaggccatagccgtacagcaccgacgccagcagggtttcgcggttgatcgcgtgtttcatcgccatgcgaatgtcgttgttcttgaattcgttgctgtcgcacagcatcgggaaggtgtagtgctgggcgcctttggtctcctcaatcacaaggcccgggttgcgtttgagcagggccacggttttcaggtcgaccttgttgatcacgtccacttgcccggtcaccagcgcgttgacccgtgcggcgccgtcggcaatggcgagtagctccgcactggcgaaatgcgccctgcccggcttccagtaatcggggttgcgctccaggtccatacgcacgccaggttcaaagcctttcaggcgatagccgctggtgcccacgccggcctgccaatcggcggcgccgtccttggcgggcatgatcaccaagtggtagtcggcgaccacgtaagcgaagtcggcattgcccgaatgcagttcgaacaccaccgcatcgctgcccttggcgctgacgctggcgacatcccccaggacggtcttggccgccgaagtggaatctttgctcaggtgatggttgatcgacaccaccacatcttcagcgctgaggcttttgccgttatgaaaagtcacccccgggcgcaagtggaaggtccacacgcgtgcatccggggtggactcaaagcgttcagccagttcgggaatcgcactgccatcaaccgcaatttccgtcagcgtgttgtacaccgccgaaaagccgacaaaggtgaaggtgtcgacccaggaaccggggtcgcgggaatcggtggtgctgcccccggccaggcccaggcgcagcacaccgccggctttgggtgtggcgtcttcggcgaaggcgtgcaacggcaaacccatggaaaacgcggccgccaccgcagcggccacggtgctgtgtttgaggaagtcccgtcggtgcatcgcttgagtcattttgttgttgttttcgctcatggtcttgctcctctaaaggtcaacaggcacaggcatgtttcaactcgatcaaggtcacgccattgcgtttgaaaccgttgcgcaagtcggtctgcaattcatccaggttcctcggctggtttaccgtgcacccgaacgcctgggcgaatagcacgaaatccgggttgcgcggcagcacgccgatgggctcaatatccaggttgagcatgtcatcgcggatctgcccgagggcgtcgttgttccacagcaacaccaccaatgggctgtgcagttcttccacggcggtcgccagttcctgggcggtgtaaagaaaaccgccatcgcccaccagcaccaaccccggccgctgcggtgcgccgaacttggcgccgatgccggccggcaagccatagcccaacgtgccgtaaccggtggggtgcaaccagctgcgcggcgcgcggctctggtaggcatagttgccggtataggcgagttgggtcatgtcgctgctgatgaaggcgtcgctgggcagctcggcttcaatgcggtcgaaaatggcctggtggatgacctgcaacggcccgtggcccaactcaacggcttgaagcaatgcggcaactttttccatcgccgcctgcgggctgcgcggcgtcgtcggcaagcgctccagcaaggccagcagcgtctggttggcgtcgccccgcagcgccacggcgcagggatagaaatcattgaatttgcgggggtcgatatccacccgcaacagctcgccggtgatgggcaaacgttctcgccaataatcggtgtcggccatttcggtgccgacggccagcaccacatccgcctcgctgatcagttgccaaccgggttcgacgcacagggtggagccggcattcagcgggtcgttgatcggcagcaagcccttgcctgccacactggtgaaaaacggcgcggccaacaacgtgctcaaacgctgcaacgcctcgccggcgtcaagcgcgccaccgccggcgatgatcatcgggcgcttggcggccgcgagcctggcaacggcctgttccagcgcctcggtcgacggcaggccacgtcccggacggcggaccacctcgcggctccagtctctttttaccggcgcggccagcacatccagcggcactgaaatgtgcacggggcgtggccgctcgctgtcgaacaccgcataggcgcgtgcgaccagctcaggcaaatcctcggcgctggaagccaccgctgaaaacgcggtgatcggcgccgtgatcgcgcgctggtcctgggtctcatgcagaatgccccagcccttgccgaggctggcggtgctgttgacgctggagatcaccagcatcgcaatggagtcggcatacgcctggccgatagccgtagcggcattggtcacgccggggccggtgatcacaaagcacacccccggcttgccgctgacccgcgcgtaaccgtcggccatgaaacctgcaccctgttcgtggcgcgtgagcacatggcgaatgccgctgccgggcaggccgcgatacagctccagggtatgcacaccgggaatgccaaagaccgtgtcgacgccatagttggcgagcaaacgcaccagggcctggccgccggtcaaggttttatcgtgcatggttttctcctagacgaatcaatgcatcgaccgccgtggccccctgggcattgaccagcaacgggttcacatccagctccagtaactgcccggcgttggcgcaggcgtagtcggccactgcgcgaatcgccgcgaccagcgcgtccatgtccgccacctcacgcccacgaaacccttgcagcaacgcagcgctgcgcaagctgagcaaggcgtggcgaatggcatcgtcggtggtcggcaacagcaggctgcggctgtctttgagcagttccaccaagatgcctccggcgccgatgaccagcgcaaggccgaagtcattttcgcgtttgatgccgacgatcaactcggccagcggtggtgtggccatggactcgagcagcaattggtcgaagagcacgcccggcgcgtaagcagcgatttgcccgcgcatctgctcaagggcagcggtcagcgcgaaaccgtcttgcaggttgagcgccacggcaccggcttcggttttgtgcggcaggtcagcgctgacggccttgagtaccaaggggtagcccaaccgctgcgcatccgcgatggcccgcccgggggtactgagcacggcggccggcgtgttcaggccgaaggcacgcagtgcctgcttggacgtccattcatccagtgccaggccctgcccttccaggcttttcgggcacagcggttcgagcctcgactcgccacgcgccaacaacacgtgccggttgttttgatagtcagcaattcggccccaggcggcaagcgcatcttccaccccttgcagcgcggcaatgcctctgctgtgcaagcgctcacgggcgtgcggcggcagcaactcagggaaggccgaggtgacgaaaccggtcttgccgtggcggctgagcgccgtgcaaaacagttcaagcaacaggtcgcactccgtgcgctcgccggtaaattgcgccgggtaatccagcaccagcatggcggcatcggcctcggtgcgcagggccgtgtcgagcatggcattcaaagcttcgcggtcaccccaaatggcggtggtgaagtcaagcgggttgaccaggttggcatagctcgggagtacctgggcgagttcaccacgctggtcttcatcgagtttgggcagggccaggtgattgcgttcggcgtagtcggcgatcagcccggcatccccgccggaacaggccagtgcaatcaggctgttgcctttgggcaggttgccgcacgcggcggccttgagggtttcgacgaaactcaccggcccgctgacgcggatcacccccagccgcgcaaacaggctgtcatacagcgcatcggagccggacagcgaactggtatggctcagcgcaagctcggcgccaatctgcgacaccccggttttcaacgcgatgatcgggatgcccttctccagcgccttgtgcgccgcacgggcaaaccccggcacattcttcaagccttccagatgcaggccgatggcggtgacgcgcggctcatcgagcaacacgtccatcaactcggccacgcccagttgcgcctgattgccgaccgaggccatataggccaccggcaacgagcggtcgctcatcgacaggttgtaggcaaagttgccgctctgggtcagcacggcgacgcccttctccaccgccttgccgccatgggccaccggccacagcgccgcgctgtgcaggtagtcgagcaggccgtagcaattggggccgagcagcgccatgtcacctgcggagctcaacagttgctgttgcaaggcagcgccgccggcaccggtctcggcaaaccccgaggcgtagcaaatggcgcccccggtgccgatggcggccaattcggccacgcaggtcaaggtcagctcgcggttggtggcgataaatacggcgtccgggccgcacggcaggtcggcgatgcgacgcacgcagggaatgccgtcgaggctgtcgtgctgtgggttgaccagccacatcggcccgtcaaaaccgccgtcggcacagcgcttgagtgcacgggccatgctgcgcccgcccacgaatgccaggtgccggggcgccagcaggcgtttgaggttgtcgcgagtagcctgggacataagcgttcctcgcgcggtcagcgcaacagtggccgcaacagttcacgggcgatgatatggcgctggatttccgaggtgccttcccagatccgctcgatccgcgcgttgcgccaaatgcgctccaccggcccttcatccatcaggcccatgccgccgaaaatctgcacggcttcgtcggcgaccttgcccagggtttcgctggcgaacaacttggccatgccggcctcgccatcggtcatgctgccctggtccattttccaggcggtgtgcagggtcagcagttcggcggcgcgaatctgcgtggccatgtcggccagcttgaagctcacgccttgataggtgccgatcggctggccgaactgcttgcggtccgcagcccattgcagcgacacatccagcgcacgctgggcctggccgacacagttggcggcgaccatcacgcggccggcggtgagccacgcgttggcaacctcccagcccttgccgacttcgccaagcactttggcggcgggcacgcggcagtcgtcgaagaacatttcataggtgtgatagccgcggttgctcacgcatttcgggcctcggcggatggtcatgcccggagtgccgcgatccaccagaaacgaggtcaccgcattacgttggcggccgttgtgttcgtaagtgtcagtcaccgcgaacacgatggcgaaatcggcgtgcccggcgtggctgataaagtgcttgctgccattgatcacgaagtcatcaccgctgcgcacggcgcgggtcttgatcgcgttcgcgtcggagccggcaccgggttcggtcagggcgaagcagtcgattttccgaccctgaacgcagggcaacaggtagtcctcgatctgcgggccggtgcaggccatgaggatttttgagggacgtgcgacaaacacatgcaacgcccatgaaaccttcgacaactcccgctcgatcaacgcctgggacacataatccagcccgccaccgccgacttcctcgggcatgttgaacgcgtagaaaccggcagcaatcgccttgtctcgaatctgtgcggccagctgtggcgagacctcatcggcgcggtccacggcttcctcgtggggcaacaattccttggcaacaaaactgcgaaccgcatccaccaacatgtcttgttcttggctgagctggaagttcatggcgttacccgtcgtctgtaaaagagggtgtggtggtttattggccggagaaaatcggcaggcgtttttccgtggacgcatgcagggcttcggcgccatcggcgctgcggccacacaacaggccggcggcaagttcagcctgcagctgttccggcaggctgcgcgcggcgccttcgcgaatcagggtcttggtctgggcgaacgcgaaagtcgggccattggccaggcgggacgccaattcgctggtgtgcgcgtgcagttgatcgtcggcgaccacttcgcccaccagcccggcagccagggcgcgctcggcactccatagttcgtcgaggaacagcaggcgcttggcttgctcggtgccgatcaggcgcggcaagtgccagctggcaccggcgtccggcgagtaagccatgccggtgtaaccggccttgaagcgcgccgattgtgcggcgattcgcaggtcgcaacacagggtcaggtccatgccggcgccgacggcggtaccgttgatggcggcgatggtgggtttgtcgagggtgtgcaggcggatcatcagggcgtgggcggtttcggtccagccgtaggtttccagggcgccacgggcttcggcatcggcccattcggcgaggtcggcaccggcgcaaaaactacggccgctggcggtcagcaccactgtgcgcacggcggggtcgacgttgaatgcttcgagcaggctgtgcaggtgcttgagggtcggaatgtccaatgcgttgcgttgcggaccacggttgagggtgatccaggcaacgcctgctgacacttgggtgagcacgggcgaatcggtggtcatggcgtcctcgaattattttatttggcgtgaggggtgcgacatggcgagatactaaacgagtgttcagtaagctggcaatcggcaaactgcaaatattttcagaggggaaataccgtcccgaacaccgagaaaggtgcttgtgcgcagatcgcctgtgggctctgtggagctttagcgaggctgcgaaggcggtgggtcaggcggcatctgtattgggaatgccgccgtcttcgcaggcaagccagctcccacactggagctgtgttgccgccgcgttcaggcggcggaaaacaactcagggcttgagctggtagcgctggcggccaccgctttgcaggccatcgacccaggcctcgcagatctggataccctgctccggcgtgaaggtgccggggttgagcccggactccagccacaagccgtcaagcaaggcgctcaggccaatggcggcaaggtcggcgtcaaacccttcccacccctcctccttcgccatatcggtcaaggccgaacgcatgatcgtgcggtattcaccgtaggagtgctcgtgggccaagttgatggcgggcgccgtcttgaccgcgccccagaacaccagccaggcatccagcagttgcgggtcgagcagttccgcggaaaaggaaccgcggaacaatgccgacaaccgttctcgcggatccggcggcgccttggccatggtctcgcgcagcaggttcatgacctgcccggtgatggatcgataggcttcggccaccaattcatccttgcccgaatagtggtggctgatcagccctaccgacaccccggcctcggcgctgattttgcggatcgacgcgccctgaaagccgtcgcgcttgaggcacgtcagcgtcgcctgcaccaggttggccttgcgcaattgcggatccatccgggaaaaccgggattcctgggtcatgtggcgttttcctgcggttgagtcggcagcccgactctacatcagtcgcggtaacccggcgacacccggtccaacaggcgcagcaaggcggaccacgccagttgcatcgcatccaggtcgaccagttggccctcttccaccggccgcgcagggttgttgaattgttgttcggtgtgggcgcacacctcggcggatggcaacaccagcttgccgcaggcctgggcggcgatctggatgtcgcaggctttttccaggtaatacatgcgcaggaaggcctcgctgacgctcgtgcccacggtgagcaaaccgtggttgcgcagcatcagcaccggtttgtcgcccagatcagccaccagccgctgctgctcatccatgtccagcgctaccccttcgtaatcgtggtaagccaccctgccgtagaactccatcgaaatctgattcaccggcaacaacccgcactccagcgcggccacggcacagcccgcgcgggtgtgggtatgcagtacgcactgggcatccgcgcgcgcgccgtgaatcgcgctgtgaatgacaaaccccgccgggttcacggcatggagcgaggcttccacggcgcgcccgtcgaggccgatcttgaccaggctggaagccgtgatctcatcaaacatcagcccgtaaggattgatcaggaagtgatgctcgggcccgggaatacgcactgaaatgtgcgtgaaaatcaggtcactcatgcggaaatgggcgatcaggcgatagcaggccgcgagttcttcacgcagttgctgctcgatggcacagggcatttttattctccaggcacggggtgggtgaaggcgacgctaatccaggcgccagtaaaaaaacaagttgattttttactggcgctcacctcctatagaaaaacaaaaataacagcgcctggagtatttgcaccatgtcgccccatgcctttcctcatctgttcgagcctttgacgctgcgtggaaaacgcctgaaaaaccgcatcatgtcgagcgggcacgacacctcgatgccgaccgacaaccgagtcaacccgcagctgattgcctatcaccgtgcgcgggccgaaggcggcgtgggcttgattgtgctgcaagtggccggggtgcacgacagtgcgcgttacacctcccatgtgctgatggccaccgatgacgaatgcatagcgggctaccgcgaactggccgagatctgccatgctcacggcacggtggtgctgtcgcagattttccatccagggcgggaaatcatggagtctgccgacggcttgctggccgtggcctactcggcatcgggggtgcccaatgagcgtttccgggtgatgcctcgggcgctggaccaggcgatgatcgatgagatcgtcgcggggtatgcggcggcggccaagcggctgcatcaggcgggaattgatggcgtggaagtggtggccagccatgggtatttaccggcgcaatttctcaacccacgggtcaatcgacgcgaggatggatacaacggagaccttgaagaccggctgcgttttctgcaggaaataatcgcagcggtcaggtcgcaaactgatgaagacttcatcatcggcctgcgtatttctgccgacgaacgcgatcccgaggggctgaccgaaagcgagtcactggaagcggttcagcacctgcaaacgcaactggattacgtgcatatcgttgccggcacctcggcatctttgggtggcgcaattcacatcgtgccgcccatggccatcgcccctgcttacttggcggatgaggcggcgaggttcaaggccagcctgtcgactccactctttgtcaccgggcgcatcaaccagccccaagaggccgagcttatcctgcaaagaggccaggccgatgtctgcggcatgacccgcgcgttgatctgcgacccgctgatgcccgccaaaacgcttgaaggccacgccgaagacgtacgcgcctgcatcgcctgcaaccaggcgtgcatcggtcattttcacaaggggttgccgatctcctgtatccagcaccccgagaccggtcgcgaactgacattcggccagatacaaccagcgttgcagcgcaaaaaaatcatggtagtcggtggcggcccggccggaatgaaggctgccgccgtcgcggcgcaacgcgggcatgatgtgacgttgtacgaagccagtggacaacttggcgggcaagtattactggcacaactgctgccacggcgcagcgagttcggcggcgccagtaccaacctgcaacgcgagatggaattggctggggtacgcgtgatgcgtaatacccgagtcgaccgcgctttggtggagcaggtgcaacccgatcatgtgctcatcgccaccggcgcagagccgtactggcccgctttcgagcgaggcggcgaactgcaggtggtggatgcctggcaagtgctgcgcgacccagtggctttgggccgctcggtggtggtggttgactggcgttgcgactggatcggccccggcattgccgaacgcctggtacgcgccggccatcaggtgcaactggcggtcaacggcacgcactgcggcgaaaacctgccgctgtacgtacgcgatcagctggcaggcgagctgcatcggctgggcattgcgatcatcccctatgcgcatctatacggctgcgatgacaccaccgtctacctgcaacacaccgccagcggcgaaccgatgttgctggagaatatcgacacgctggtgttgtgtcaggggcaccagccagtggacactctcggcgcgcagctgcaaggcctggtgccttttgatcgcatcggcgattgcctggcgccgcgcaccgccgaagaggcgatttacgaaggactcaaggtagcgtggaatctttgaacgacgaacctcagcagctgtttctcggcacgcgcattcgcggcctgcgcaaggcatgcggcatgaccttgactgacctggcgcaaatgagtgaattgaccgccggttacctcagccaattggaacgcaacctggcgtacccatcgatcccggcgctgttcaatatcgcccgcagcctcggcgtgaccatccagtggttcttcgccagcgaaaccgttccggccccggcggatgagggctacgtcgtccgcaagggcaaccgccaaagcattcgttatgaagacggcattgtcgaccagttgctcacccccctgcccaacaaccagctggaaatgctgcactcatgctttccaccgggcacctacagccagcagagttacagccatgacggcgaggaagcgggctacgtattgagtggcggttttgagttgtggatcggcgagcgacactttctgctgaatgagggcgacagtttcagctttgccagcagcgaaccccatcgctatggcaacccgggcgaggtggatacggtggtgatctgggtgattacgccgccgacgttttagccgatcgggcaaaagcagaagtttcctacaggaactggcgatagcggcgcggcggccatcagtagttaagggctgattcgcttgctataaaaatggctacttctttttcaggattgttgccatgtctttattgcatgtgttgtttggagaaccgactcaggatgaccgggagcgggtgaaggccattcaatcctataaaacctggaagctccatgactgcggcattggcgtcgacgctgcggagatagcggaatccgcgcattacagggaggcgatgcgccaggccgcacagctcgaggtcgacgattcatgggcctgctgatcatcgtgccgttactggtcagcggctacatggtctgcctcagacaccccttcttctacaaccgtttacaccggtttcaaggccagctgctctacctgcaggttgcgaggctgggcatgatttgcctgactgccgctacgctcctgagtgcgctcatacttgtgttgtcaaagcagaatatccagctcgcggggcacccgatcgcaacagactacagtcgctatctcggctcgctgctggtccaactcgatattgccaacgaaaaaaacagcgtactttggatctttctgatacaagccgggttcaccgccatgctcctccctgccttatgggcaaagctttacatttatgcgagaaagaagctgctgaaactggaaacggacgagcagttcaactacctgttgtcactgggcgttcttgaaggcaaccccttcaggcgtttgttgcgagagtcgattgagcaccgcgtcgcctgcctgttcagcctgaatgatcgcaaggtgtacgttggatttgtaatgttcatcggcgtgccaaccgagtccgagggcatggatcacggctttaccctgctcccgattctcagtggctacagggacaaggatacactggagatcacgttcaccactcactatgccaatacgcattgccctccttccatcatgctgattcaggaaaacgtcgtctcggctacccgctttgatttcactacctggaatacattgcaatcccgcaaaaaccgcaaggcgcgacacagccatgtttaccaacatcgccccacgcgccctgtaaaagccccacgcgcctgcgcatgaggctacgtcacaccgtcagtcaaacttccagttcaaacccacgcgcagcatctgcccgtcgttcttgaatttggagtcgtagccagtaccggcaccaccactgcccggaatcaccgccacgttcaacttgtcctggcccaggtcgtagtacaggtactcggttttgaacgagaggtttttggtgatcgattgctcgatacccgcgcccacggtgtagcccattttgaagtggctctggtcgccgctgaactgggtgttgccggtcgggccgaacatgtcgacgctttggctggtttcaccgtaggccaaaccggcggtgccgtagatcaacgtatggtcgaaggcataaccgaagcggccacgcagggtgccgaggtatttgatcttcgattcgaatttgttgttcaacgccagatgggtattgagctgcgacgtgccgatattgcggctgtcctgcaagtcggtgtgggagatatccgcctcgacaccggctacccactggccgaactggtagttgtagccgatctgtgcaccgcccagcaggccgttgcggtccaggtttacgcggcccgggcgtgcgccgccgttgatgttggcaatgttcggggccgcctggcctttggtgttgacgtcgtcatcgccgccaaaaccgtagccggcgctcaagccgccgtagaaaccggtccagtcggttgggccctcggacgaataggcatctgccgcctgaacagccgacgaggcggcaacagtgagtgcggtaacggcaagtaaacgagtgatcatgtgaagctcctaagttttttgggtgtatgacaggcacagcgttgccgcacgccgatagctaccggcgcgaagcagaaactcaaatcagggggtgtcgctaccggaccgagcggcccggcggggtactactggccgaggaaacggtagtcagcgctgtaaggctcgacgtgcaactgcccggcctgctcgcaggtgccgctgaataccccgcccagggtatgcaggcgctcaaccgcaaccacctgcgccaggccgcctgtaccctggtgtgtcaccacatccagacgcagcagcgggatatctttcgtactttggcccggcgcttgggcgatgactttgccgacgaccgcactgcggtcatccagctgccaggtcggcccggcgaagtgccggccaaccgtcttgccgttgatcatcagcgtcgccagcggctcgcgaaactgccaggtcaattggccgctactgtccttggcacaggtgtagatctgcacgcccgtggcctgcaccgtcatcagcacctttttcgcgccaccgtcagcaggctccggcaaatcctgggcttgcgcgcgctgcgcatcaaacgcacagatcaccagcacaatcaggccaatcacctgcaaaaccagaagcgcgaggcgattgcggcgcgccacaacatcagggtcagtgctgctcattttgcgcctgccgggggaggagtcgagaagggtctgggtcatcattgtggatccatcagtagtcgataacagctggttaccagcgtctgcaggatgaacaaccgacccggagtgtttattcccgactattttccaaccctggcaaaaacgcctggtctaccagacttcaactttcagctccgggcgttggctggccggcatcgccagcgccttgccgctgtgcaccacaccatggcgcggcgactcgcgtttgaggttgggcaccggtatccgcccaccaccgcgtacggtttgcgcaccgttcatttggaacttgccgtaggcaaagttcagtcccacgccgttctggcgctggaagtaaatccaccagcgcccttgctcgaacttcatgaaggcaaaaccgcgtgggtaggcgtcttcgccatagtcgtcaaaggtcatcgccgtggcgaagcccagaccatggccatcaaaccggttgaggtattccttgttcaggtagtcgctgccgccttgcacgtggaacacccggtaggtggtgtcgtcaatgtgatctatcaggatcgaacagccgctgaagtccggcgtaaacacataaccggtcgcgcccgggttggccgggatgtcgcaaaaactgccctgaggcacccagtgccccatcagcggccgctcgaccttgccgtgctcgcctggcttgtccagggtggccagccgatagccacccgccttgtgatcattgacgtcgaacacattgagacctgccagcacactggtgggaatacgcttggcggtcatgaagtgctgttgcaggaaggtcttggtggatgaaaacttgttcatgcactttgtcgtcataaggggctccaggcaggggaagaggcggacgtcttgccgatccctgaaaacgccgttcgaacatcagaagaacaccctcctgcgccgctttattccatgatttcacttaatcgaaatcggccttttccatgcagataattgtcttcgccctacccccttccagccggtagccttcggccctgcgatgccttgcgcacgcacgaacaccggctgcaaacacagcatcggtgcctgaccccaaagtgctcgatagatggcgcccccgtgaagaaacgttcgatagccctactccttgccggcctgctccagcttgcgcaggttcacgcagcaaccgccccgattgcggtgatcgcctacgcggaaaaaccgctgaagctgattcgcgccaccacgctttacacggtagggccggggacgcgactgcaaggcggcgatattctgcaaaccggcgccgccggcatccagatcgaaggtcttgcggcagctaacctggcattggggccggacacgcgcatcctgatcgccaccaaccgcaaggacacccagatcaacctgctcaatggctggctgaagctgcaaccggtcgccagcaacagccacgccaacctcgcagtcaccaccggtggcctggcgttcaccttgaccaacagcgccagcgtgatccacgtgggcaagcgccagaccgaaatatttgtcgaagacggcagccaagtggtcaacgaactggacgcccacggaaaaaccgaccacagcgtcaccctcggccatgaagactttgcgcaacgggtcggcgacgcaccgctgaagatcgtgccgcgcccggagcaagcgtttatcgacgccctgcccccgcagtttcttgacccgctggtgcccctgggcaagaaaacgcccaaggcgccggagcccgtcaaagaacgtgacgtcacctacgaagacatcgcgccctgggtggtcagccctttgaacctgaaccagcaaatgctcgccagccgttttgcgccgcgccttaacgaccctgctttcctgcaggcggtgaaggccaaccggggcggcgtgctggcgtgggaactggaattgcttcgcctggaacgccgcaaaaatgcgcgctgatcctcatcacgcttgcacccgaaggtccttatgaaattgtcgctcgcggttaaattcaacgtggtgttcctggcggtcttcaccgtcgggtttattgccaccagcctttccaccaattacatgctgcaacagagtgcgcgccgggaaaccctggaaaccgcgcgcatgctgatgcgctcggcctccgccgccagcacctacactgccgaacagatcgtgccgttgctggaaaaccgcctgaaattccaattcctgccgcagtcggtcccagacttcgccgccatttcgcacctgcaggaactgctcaagtcctatccggactacgcctacaaagaggccacgctcaacccgacgaacccacgcgacctggccaacgactgggaaaaatccctgatcagcaacctgcgcagccagccgcaaaccgatgaaatggtcggtgaacgcaatgacgacaaaggggcagcgctgtacatcgcacgccccatccagatcaaggacggcgcctgcctggcctgccacagcaccccggacgcggcgccgaaaaccatggtcgacatttatggtgcggtgaacggtttcggctggaagctcaacgacaccatcggcgcgcaactggtcaccgtgccactcgacctgccgctacaacgcgccaggagcatgctgcacagctacatgctgtcgatgcttgggatatttgcggtgctgttcgtggccttgaacgtcgctgtacacctgttcgtcacccggcgcctgcgacagatgtcggcactggccgaccgggtcagcctgggggaaaccgatgtgccggagatggacgtcagcggcaaggacgagttggcgcgcctgggccaatcctttggccgcatgcgcaccagcttggtcagcgccatgaagatgcttgaggaataggtccgcgatcatgcttgaacaactgggcaaataccgcatcgacagcgtgctcggcaaaggcgccatgggcacggtgtacaaagcgttcgacccgaacatcgcacgcaccgtggcgctcaagaccatccgcaaggagctgttcggcgacagccagcacgccgagctggtcagccgtttcaagaatgaagcccaggcggccggccggctgatgcaccccaatattgtcggtgtgtatgactatggcgaggacgaaggctcggcctacatcgccatggagtttgtcgaaggtacgccactcaataccgtgctggccgcgcagacgccgcgtgagctgagccacagcctggagtggatgcgccaactgctgtcggcgctggactatgcgcactccaagggcgtggtgcaccgcgacatcaagccggccaacctgctgatcaccgccgatggcaaggtcaaggtcaccgacttcggtgtagcgcgcctggactcctccaccctcacccaaaccggctcgatgatcggcacgcccagctacatgtcgccggaacagttctgcggcgaactgatcgacggccgttccgacgtgttttccgccggcatcgtgctgtaccaattgctgacgggagagcgaccgttctcgggctcagcgaccatggtcatgcaacagatcctcaaccagacacccgtggcgccgtcgagcctgaacctagccctcgacccggcactcgacgcggtgatcgtgcgcgccctggccaaacgtcctgccgaacgctacccatcggcccaggcgtttctcgatgacttggaagccttgctcggcacgaccacgggtacctggatcaacgccgagatcgacgacgaccgcaccgtactgatgcgccccaaccagccactgagcagcggcgtcacgccactggccacgcccacggtagcgatgaccgaggcggtagaaaccctgacgccatggaagctggcggtgatgcccgaactggaatcgctgctgtcccatcagatcggcccgttggcgcgttttctggtgcgcaagagcctcaacggtgcggatgatttcggtgcgatttgcgcggcgctgctgccacacattccctccgaacgcggccgcgaacagtttgccagtgccagccagtcactgttcctgcggctcaacccgccgaccgccgtgcctgagccaacgcccgtcagagacgaacccacgaccatcgaggcccccgccgaccccacccatgttacccaagcggcgcccgcagagatcgaccctggctttgcgcagatggctgaacgccgcctggcggaactgattggtcccatcgcacgaatcattgtcagccgcgccttgcgcgccacgtcccagcgccagccgttcctgcagcggctggccgagtcgatcgacagcgaggccctgcgcctggcattcctcaacagcttcgagccccttccatgaccgattccccactcagcgcctgcgggccccactcactggcctctgcggttgcctatggggccagtgacgtcggttcagtgcgccagagtaatgaagacaactttctggtggagcctgccttggggctgttggccgtggccgatggcatgggcggccatgaggccggcgcgctggccagtgcgcaggcgttgatgagtttgcgcgaggcgctcaaggcccattcggccaacccggtgaacaccgacaccgatcccgacgccacctggtcggacccggacatgcaagctgccagccgcctgcacaacgccatcgaccaggtgaaccagtgcgtctaccagcaaaacgtggcacgccacatgagcgaaggcagtggtatgggcaccaccttgaccggtgtgtggcgcccccagcccgacgggccgctgctggtatttcacgtcggcgacagccgcctgtaccgttaccgcgaaggcgaattgagcctgctgacccgcgaccagacctggtaccaacaggccctggaagccggcaaggtggatcggctgccagcacgtaacttgttattgcaggctatcgggccggggccacgggtcgagccgcaagtccgagtgcaaccggtacaacccggcgacctgctgatgctctgcagcgacggcctgcacggctgcgtgccgcacctggaaatgctccaggtactggccatcgcccgtcgcgacacgctggacgtcgcgtgccagcggctggtcgacctcacccgcgaatatgccgggcgcgataatgtgacggtgttgctcggctggttcgaccgctgattaacctcatggcagcttgaacgcttcgtccaccggcacacggtaacccgtggccagcctgttggtttcgttggccatgcccaccaccgcctgcagctcgccgaacatcgcgtcggtcatgccggccttgcgcgctgccgccgtgtgggatgcgatgcaatacgggcagttgttggtcacgctgacagccacgtagagcagctctttggtcaacgggtccagcgcccccggtgccatgatttccttgaggctagcccaggtgcggagcagggtcggcggatgggccgccaggcatttccagaagttattcacctgatcgaccttgcgcgtttgcatgatgtcgtcatacacggcgcgcacttcagggctggcatcggcgtattcggtgaggtgttgggtcatggcgggctccaggctgatggcgggtgttctgaaataccgcgcaacacctgttcaaggcaagtgaagccgtggttttttagagcaattcacactcgtgacttcaggtcaaaagtccttttcgggtttgacggtttttccgaaggaacgacgcgcggatactcgactccattgttcacaccctttcaggagttactgatgtctaccccacaccaaaacatccccgcctttggcctcggcacctttcgcctgcaaggccaggtggtgatcgactccgtgagcaccggcctggagctgggctaccgcgtcatcgacaccgcgcaaatttacgagaacgaagccgacgtcggccaagccattgccgacagcggtgtgccgcgcagcgagttgttcatcaccagcaaaatctggatctccaatttcgcagaaggccagctgattccaagcctgaaagaaagcctgcgcaaactgcagaccgactacctcgacctcaccctgatccactggccatcgccggaagaccaggtgcccgtcgccgagttcatgggccaactgctggaagccaagcgcctgggcctgacgcgtcagatcggcatttccaacttcacagtcgatttgatgaaacaggcgattgccgcagtcggcgcggaaaacatcgccaccaaccaggtggagctgcacccctacctgcaaaaccgcaaagtcgtggatttcgccaccgccaacggcatccagatcacctcctacatgaccctggcctatggcgaagtgctgaaagacccggtgatccagcaaatcgccgaacgccatcaggcaacaccggcgcaagtcaccctggcatgggccatgcaacacggttatgcggtgattccgtcttcgaccaagcgcgccaacctggaaagcaacctcaaggccgtgcaactgaccctgagcaccgccgacatggctcaaatcgacggcctggagcgtggccaccgcttgaccagccccaagggtatcgcgccgaaatgggactaaaccctggctagcggtgtgcgggataactcccgcaaccacggcaacacccgcaggcccttgcagtccttcggtggatcgatgatgtccatgaagtgttccaggttgacgttgtccggcaccccgggcaggcgcaccagcaccgtcggcgttgcgccggcgagtgtgcccgggtccaggtgatcgtagaccagtacgtgccgtatctggggttgcggcccacacacatcgtccgccaaccccgcgttaataatgagtacgtcgaaaggttcggccggaatagccgtgagaatccgcacctcttcgaacgtttgcaccgggacaatccggtgataccccaaccggttgagcattttctcgatgtacagccgttgcaggtgctgttcatcggcaatcaggatagtcagtgctttgttcggcatggcaaacccctgggcaggctgtgctcgtcagtgagcgtcgcccattctccagacaaatcccgtagacaaaatcaggcttgttcccccttcacgtaggcgttttcccaaatcacccgaacggcgatcaacctgcgccatgcacatcgcaataagcgctcaaaccaccgtgcaattcgccaatcgcctcatcgaccgcgtcagccgccaaggccagcgcgtcgggctcctgatgttcgcatgcgctttccagcgcctcgcaacaggtgattaacgtctgcgccttgatcattcgtgctccccccttcactcggtgagcgaggtcgtgcaacgcatgaaaatcgccctgatgcagtaacgacgagagtaacgcacggtctgcttgcaggctgtcgagcagcgacgccaacagctcttttaacgcggcgtggtcgcctgcggtcagctttaccaacgcgctcaaatcaaaccctgctgcaggctcgcacgggccagcggtaagcgaggccagggccgagcgcaaatcatccagacccgcaggcttgaacaggcagccatccataccggcttggcggcaacgttcggcttcctccggttgcgcattggcggtaaaacccagcaccaggcacggaaccagaccttgcgctcgctcattcgcacgaatatcccgcgccagggtatagccatccttgagcggcatgttgcagtcggtgatcaccacatcgggtctctcggttttccagagctcaaagccctgcacaccgttttcagctgttgtagtgcgatgccccagaactttcaattgccgggccagcaataatcggttggcttcgtagtcatccaccaccagcacttccaacatgcttgccggtgggacactcggagtaaacgacgcgacttccggctgcggcatagtcgtcctggccaacgtcaacatcacatccgtgcgagtaccctgccccagcacactgctcaaatgcagtgtcccgcccatcatttcgcacaggttgcggctgatcaccagccctaacccagacccggtacgcgccgatttttcggtattgctgccctgaacaaaaagattgaacaggcgcttctgatcttcagcgctaatgcccctgccgctgtcttctaccgataattcaacgctcaggtggttggcatcagatgacggcaaactgcgcccacacaaccgcacataaccctgggaggtaaacttgatagcgttacccaacaagttggacatcacctgcttcaatcgcaaggggtcgatcaacacttggcaattcaacagcggatcaagttcgaccttcaacgccaggccattctcccgcgccagcccctcgaatactcgagacagtgacgccagcaattcgtgcaggttggccggcaccgggctcaacgacagatgaccggactcgatcccggcaatatcaagaatgtcggcgatcaaatccagcaaaccgcgagaggcaaccgaagcaacttccagggcatccaggtcaatatgcccctcctcggcgcctctgcgggtcagttcgatcatgccaagcaccgcattcatgggcgtacggatttcgtgactcatggtcgccagaaaggtggtcttggcgcggttggcggcgtcggcttcatccttggcctcttgcaactgacgcaacagttgttggcgttcactcacatccacccaaccaccgatcatgcccacgacgttttcatcgccatcacggtacggaagcatccagtggtagatcgtcaacaccttgccactcggcaccttgagtaaccggtcatgaatcagcggttcaccgcgctccatcagccgcaaataatcttcgtgaaatgaacgggcctgcggcgtgttgccggtgtcggtttctatcaccgtcttgccaaccaccccttcgagcgtgaagccgaacacctctaggtacgcgctgttgcaggccatcaatcggccctggcggtcacgcacataaatcggataaggcgtgtcatcgatcagtacacgcatgaaccgcatctggtcgctcaaggcccgctcggcctcggtccgtttgcgtatcagcctgcgcaggtaaatcgcccaccccagcgtaatcaacagcagtatcgccgccaggccgaacccttgaatgatcgcgttgcgatggcgcagccaatggtcttcgatgaccatgtccgtgcgccacgggctaatcatctcgtccaattcctgagggggaatactttgcaaccctttgtccaatatggaatacagctccaattggccacggttgaccccgaacgtcatacgcgccggctcagaccccacggtactggtgacatgcaagctgtctcggtactgaagcgcgatgaggtagcgcgcattgagcaacgcgttgaccgccccctccgcaccgccattggccaccagcgccatggcctccacaggattggcgacctcgacaaagtggatgcccgggtaatcgcgattgatgagttcacgcaccgcgttaccgcgggggagcgcgagacgcttgccgaccatgtcctccagggtcatcgtggccgggtcattgacgcgggtaaccagtacgagcggggtgctcaggtagggccttgaaaagcgcacttgatcggagccttcaatgctgggtgtcaccacggccatcatgtcggccttgcctgtgctgaccgcgtcaatctgcgcaggcatcgagccgcccgaaacaacgtcgaacttcaaccccgtgcgcaagctgatccgggacaacacgtcggcactcagcccctcctgttgcccctgcgctgtaaaggacgatagcggcaacatctgatcggaagcgaccaccctcacgcgggggtgcctctccagccagcgctgctcacccatgctcaagtgcagccgctcggcaccgagcagccccagattgccaccgttccagcggcgcagtatttccatctgctcctcggccggaatcgcgctcagtgccgtattgatgatgcgcagcaaccgcgtgttgtcacggcgcacggcaaaagcaaacgagttggactccagctcggaaaagtccgcaatttgtacgttattgaggtggttgcggctgatctggttattggccgtgattgcgtcgcccagatacacgtccgcccggcgaaaggcaaccgcggcgatcgcttcgaaaatggagggaaacagctctacctgagcattggggtagaaggccttgacgacctctggcggcatgtagtgatagagcatcgccacccgcttgcctgccaaatcgtcagtcagggactggctgtcgcccgtgcgagtgaccagcaccggttgatcattggcgtaggaccgggacagtacgagctccgagtcagcggcctcaaacccattggacgacccgaggaggtcgactttccccgacttgagtgcttcgatcacttcgtcgcgggtgtcgtagcgtcgcacttcgacagcaatgttcagcgtcttggcaatcaactgcgcataatcggcggtgatgccttcaaagtcgtcgttgttattggtccgttcaaaggggtcgtaatcgggagccgaggcgcccaacaacaagactcgccgctcgcgtagccagtgccaatcagcgtccccaagctccgcggactgcccattgaagctggagtgccccagcaaattcagagtgcggggttcatcgagggccatcgccgccatcggcaacaggcccatcagcagggtaatcaggaagcgtcgaaaccgggcaatgaccatgttgagtcagatcagtccgttacgcctggcgaaatcggccattggcactacggaatctatgttcaacttctctttaagccgtgttttgtaagtactgatggttttgtggctcagcagcattcggctggctatttcgttgttgcccaacccgagtgccagcatctgaagcaccgccagctcgcggtccgaaagcgaatcaaccaggtgggcctccgtagcttgcaggtcgtcgcggcgtaccgagctgctcggcaaactgggaaagcaactgtaattggacatcaccgccttgatcgccttttgcagttcgtccagctcgcctttcttggagacgaagcccatggcaccggcgcgcatgcatcgggcagaaaaatgctccgcagaaaaccctgtcagcaccagaatcttgcaaggcagtcccaatgctttgatgcggacgatcacatccagcccgccgatcttgtccatccccagatcgagaattagcaaatccggacgttctacacgggcaatctgcatcgcgtccgcgccgttagccgcttcgaagatggtgtcgaagccttcctgcttcagtaaaaacaggacggttttacggatgaacgggtggtcatcggctattaacgctttactcataaaactcccctgagaggacagatacccttgcacatcacatgggacacaggtacctgtgagaaatgacagttccgaccagcggcgccgcatcctctcagaacaacaatcaggctgcgcctggtcccttcgattgaacatcatgttgaacgcctacagccaaacggttgccaccggctagctggaagcgcgcaacgttaacaacgaaatgacgttcaagccgaagggaaagtcccgacttgatgtaggatttatcctggcagaaatagcgttgatccagcgtccgaccacgcttggcgcaagccggctagtccgttgtactcgggctccagaacgcttgcaccaccagcgttgacgtggaaatacgcgccaccaacgcatccagctcatcgccgtcgaccgacgtggcagccagggtggcctcgatctccacctcttcgctgccgaacggccgtacgtccacatcgctggccgggtagttgcagcgcgccagctcggcttccagcaacaccatgacggcctgttgctgggtacgtcgggctatcacgtagaggatgttggtcacctccgccgacaccacatccaacggctggcggttgatgttattgacaatcggccgcagcaacgtgttggccgccagcacaaacaacgtgcccagcagggcttcaaggatcaggtcggcaccggcgcaggcccccaccgccgccgaggcccacaaggtggcggcggtgttcagcccgcgcacgttaccctcttcgcgcatgatcacgccggcccccaaaaagccgatgcccgaaaccacgtacgcaacgacccgcaccgcgccttccgcaccgccaaggcggttggccatgtcgacaaaaatcgccgcgcctaccgccaccagcacgttggtgcgcaaacccgccgtacgctggcggtactgacgttcgaaaccgatcaggccaccgagaataaacgcggcggtgaggctgaccacggtgtcgaccagggaattgaggttgatgttgttgatggcttgcatgggaagtctccttgagtgcagcagcaagctgattacacggaagaaccatcaggcaggcgtgtccatggcaccccggtgagacccgggtgcctgtcagcgtcgatgagaggggggcgggcaggtgccaaggctggccgctgccgggatgccgcttctcgctttataaggcgagacaacggcatcgaaagaatgcgcgttaccttgccaagttggtgccggttaccgaaaccggccgacgactgtcactcgaacaagtacccactgagggactccgctattaatgaaaacgcgcgaagcttacgcttcgatgacaggcgagtaaaccgtaggaaatttactcgccaggattaggacgattcttcagggcaggttcagaaactcatttattgaactcgctgctggccaaatgtgggagcgggcttgctcgcgaaggcggtgggtcagttgaaaaatgtgtaactgacacaccgccttcgcgagcaagcccgctcccacaagagatcggcggatactcacggctacagcgcgggtcgatcccgttcgaccaacgctaggtactcatcaacttgcccaccggccagcgccttgacctgaatcgacaccgtatttacctgccgccccatggtgatcccttctcgcgtacgcacctgcacgtacccaagcttgggccaaaagcgctcggctttggtgttgccaaccacaaccgtcagccgcagccagcgagcgccctttctggcagaccacgcctcgaggtccgcatgcaaccgcctcgcaaggcccgttccatgaaggcgtgtgtgcaccaacaacaacccgatatgccaaaccccggctgccagtaagtcagccgcgatattgatcactgcggccaggcgcccctcgatgtcgcgatagcccagccaatacattcggctgcaacgccagcccgcgggcagatagccctgcaattcatcctgcgcttcggcaggcccggcaggttcgccgttgaccgcgatgaaatacgccggcgcctgttcaaaaaactgctgcagctggggtgcatcgccggcatgcaactcaaccacctcaatgccctcgacggagcagcccggcagcacctgtgaatcaacgtccatgtttacgccccctcaatcgtcgcgcgtgagtacttccagcaactcgatctcaaagcgcaaatggctgttgggcttgatatgcccgcccattgagcgctcgccataagccaaatgcgccggcacaaaaagtgtacgcacgccccccacctgcatgcccatcaagccctggtcccagcccttgattacgcgcccggtgccgatcacacactggaaaggcttgccgcgctcccaggacgaatcgaatacggtgccgtcctccagggtgccggtgtattgggtggtgatcagcgcgcccttgaccacggctttgccgtcgcccaggcggatgtcggtgatctggagttcgtcgctgctcatggggttctcattgaatgcgcaaaggctggggttttcccagaaacgggtgggtttggcaagtgcaggagaaatctgaagcattccatttccctttcacttgcgtgcgccaacgccatgatcgccggtcggctgtatcgcataaggccattgccccctacaaaagcccacgactttccctcatcgaaaatcctcccccgcttattctcggtgccagtccttgcgctcaccctaggcacagaccattaattctgaacagggcctacccgaatgaccatcggttccaacttcaattacccggctgatatcgcgcagcggcatcatcgaaaaaagcgctctacccggaacaaatggagagcgacattccctaacccgcccgacgtgtgttttgactaccgtgccttggtggagcaagtcaacggggttgcgcaagccactgaaccccaccataaaatttgcatcattggtgctggcattacaggtttaaccaccgcacgcgagctctacaggtgcggtttcacaaacattactttacttgaaaaatccaggcgcattggcggccggcacctgaccgctcttggaagcaaaaacagccacactgtcggcaggcctcctttcgagatgggggcaatgagaatgccgttcttcaatacttcaaatgagcccccgaaggacgggcgctccctgatggcctattacgcaaaggcgtttgacttacaccactcagacttcccaaacccaggcagtcccgccgtccgctcaacgggcatatacctgcgcgaaggcagcatcgatggaagccgtgaaccgaccatgctcatatggaaaaacgcgaatggaacaactgcaccacccgggcaaaccctgggtggcgtttttgcaaagtggaaggcattcgcggagcgcatgaccctgactatttcagaacactatggctccgaacgctgggaggacatgtgggcatccatcataagaaagtacgaaggcatttccttccgtgacttggtaaaaatgcccagcattaattcatggcacccaagcgatcccgggaattttggtggcatgggcatgaccacccaggagtctgcggtcttctacagcatcggcataggggatggcagttggggagccttctacgatgtgtgttcgctgtacccgctgcgcacagcaatatttggattcagcagtcatctgcaactgatccatgggcgggtggatgcaaacggtaaccctctaccctcaccgtatctgaacgctacagaaactctggattcaagagggcttgaattcaataagccaaactacataggcttggggtctctggcgcaatcgctgctctttataaaaccagacgacactcaggactccttgtacgagcatttgatcaaacgccaatccggcttactgacccgcagtggcgtgacgaagctggaaaaacttgataacgggcagacgcgggtccattacgactggaatatcacgtcaacaggaccgacacaccgggaattcatcgactgtgactccgtggtaatgacactgccctcatggctgatcgaaacccaactatcaatcgaaaatttcaaccaggacatactgcccttcgacatcgttgaagcctataaaacggcacactgggaaaccagctgcaaagtatacgccctgcttaaaaaaacgttcctctcacacaacaaaaccattcctcaagccatcgtaacggatagctttatacatgacgtatatacctaccgatacaacaaccagaacacttacgactgcatcctcctcagctacacctgggaggatgacgcgaccaaactgtccatattcagcgatgaagaaatcgttgataaatgcatagcggaactggacaggatccttctgaaatccacaaacataaaccaaaaaatatcaccttacatcgggcacaaacaggcaattgtccagcgctggatgaacgacaagaacgcccttggctgtgccaagctctaccgtgcaaacacctattacgacgctgtcaagttgatgaaatacagcagggactttgctcaccgttcagggctctatctttgcggcgaatctttttccgttgacgcaggctggaccgagccgtgcttcagaggcgcccttgataccgtcatccatatctgcgccaacacccaggcaacgttcaacggtggttttaccctgcaggactacccccactatgcgatcgaaacataagagaaataacccacggcctgaccggaaccgtccgacttttaattaaacatcccgtcgcctcttatacacacccaacccaattcccggttgtataacaataagaggcgacctccatgagccaaccagcaagccccgcccgcgtagcggtcatccagcttgacccgcaggtcggtatagccaaccgaaccaataacctgcgtcaaagtcttgcactggcaacagaagccgcaaacggtggcgccaatctgattgtgctgcccgaacttgccaactgcgggtactttttcagcagtcgccaggacgcctttgaccacgccgagttggtctcgggcggtgagagcgtgagggcgtggatagatttcgcctgcaggcatcaggtgtacctggtggcgggcctgagtgaagtagacggtacgcagctgttcaacactgccgtactgctgggcccggacgggtttatcggcaaataccgcaaggcgcatttgtggaacctggaaaaactgtggttcaccccgggcaatacaggttttccggtgtttgaaacgccgattggccgcatcggcttgctgatttgctgggacatctggttcccggaggtgccccgcatactcagccagcaaggtgccgatatcatttgcagtttgaacaactgggtgtggacaccaccgccgctgttcgatgaggcgggcaagtgcatggcgtcctacctgacgatgaccgccgcccatgtgaataatgtgtttatcgcggctgccagccgcattggtgaagagcgggatgcccgttacctgggctgttcattgattgccggaaccaatggctggccgattggagctgtcgcttcggccaatcgtcaggaaattctattcgctgacatcgatatcaccagcgcccgcagtgcgcctatctggaacagcctcaacgacctgcagcgcgaccggcgcaacgatctctacgatcaaatgctcggttactcccaacaccctgcacttccacgctgatgggagggctgaagatgcaagtgctcaataccgaagcaaagcccgtgcattcaagggcggatgtcatcgtcctttcactgggttcaatcattgcactgctggtgctgtgggtgacgctaagtcatcaaggctcctggccaggctacgccgagatggtcgcaggtctgccacaccctgccgcctggcttagatgggtcataggggatatcagtgaagtcgccttttataaacatgaactggcttcactcgggctattgggcggcgcctacctggcgtggtgggcgagcacgcgaggaaaaagctggcaggggttttccatcgcctacggaaccggattgtggccctggctggtcaccagttcgctgttggggctactgctgagtaatctgctgtggggctggagcgtcaccgagcaggcgtggcaacccaccttcgcagcgttcgtttccttgcccgccgccatggtgctgatgtttggcggcggctggaaagtgacgctcaacggagcggtgctcggcgccctgctggtgacgccgatgtgcctgttgatcgtaaacttcgtatgcgcgcccttgggtttacccgcggtgatcggcaatgtgtcgggcatggcggtgggcagtgtcattgcgtttgtgctctgccggcgagtgcccttgctggtcagctctgactacatcccccccgtcaaaccaatgcccgtaaaaccgcctgcatacggtgtggtctggagcttgcgcagggtcctcgcggacttttccgaagcaccttttttcggtaacgaactggccagcctcgggctgctggcaggcgtgttgctggcctacgctctgaacccgatcagcccggcttatgggtcaggtctggtcttgccgctactgggcgcgcaggctctcacctcggccttgggcgtcgtgatctggcggcaacagtggatcaaacgaggctggtatccgacctacgtaccgctggtatcggtagtgcctgcggccgtattgacccatggaggcagttggacagtgatgggctcaagcgcgctgctcggtgcactgatcgccccccccttggcctgtgcgattgccgggcgcttgcctgcgcactttcatccctatatcggcaatgtcacctccatggcgttaagtacgctaatggtagtaccgctggtaggctggttcattcaggcgtgaggagtttttttggcctgcctgaaggtcgatcggtcgttggcctgcaggcagccacctgcaagccccacccagtggtgagcgggcctgctcaccactggggatggggggcacgcgtcagagccaatgccagaaccggctccagaaccccctccccaaatcatccttgcaccccgcatattgcgccgcatacatctgcgaacgcgcctgcaccttgctcgccaccggcggcagccaggctttggcggcataggtgcgctggcgatagccaccccagccttcgtggtagttcaggtattggccataggcgtcgtatttgtagacaccgttgatggtgtaggtcttgtccatgtaccagccgacaaagtcgatggcgtcgtcgaagtcctggcggctggcgcccgtgcggccggtgcttttctggtagtccttccacacttcatccttggcctgggcgtagccggcggccgtcgagacgcggccccaggggatgatccacagcaggtatttgcgcggggtcaaggcgttctgacgaaaaccggattcctgatacatgatggcgaacggcacctgaatcggcacgccccagcgcttttgcgtgaccttggcggcgtcgtaccagtcgtccttttcacggaagatgccgcagatgtcgtttggcgtgcgtggcggcgaggtgccgcacgccgccaacacagaggtgagtaacaacaaaccgacggctttgcctgcgctcaaggggcacctttgcgtgatacgcgtaaaaagccggcattttacgcgttcacgctgccagatgccgaattgtcatcagtgttttttgatcaccgccgtgacttccagctcgagcaagccgccaccgggcagcccggccacgccgacggcagatcgtgcgtgccggccctgttcgccgaatacgtcgatgaacacttgcgacgcaccatcgaccactttggaaaagtgctggaagccctcccctccgtacacaaacccgcgcaaaaacagaatgcgctcgacattttccagccccactgcatggtccagcacgctcaaggcccgtagcgcgcaggtttgcccggcctgcagcaccaactccggtgaagtctggtcggtcaccggaccgctgatcacgccctcgcccacccggcacacctggccgctcacgtacgccaccccgccatgaatcgtcacaggcacatagtcaccctttgggctgggcatctctggcaagactaaacccaaggtgcagattttttcgagaaggctcatgaatgggcctcggcaaactccacgtgcccgcccagccagcaaccctgtacctgcccggcttcgtcccggcgaaaacgcagggaaatctgcgaaggccggcccatggcgcgaccctggcgaatatgcaccgggcgctcatcagccgtcaccaactcattttccagcaggccaaacgccaaggctgccgccgcgatacccgtggcggcgtcttcggggtagcccgaggacttgggaaattgccgcgcatcgaactggcggccctcaaggtccgacggcgcgtaggggtacaaaccggtggagccaatgcgctcgcacagttgctccatgcgccgatagtccggttttaggccgtcgagtaccgccacgctcttgagcgcgatcaaggttttgacgcggctggtgcaggcgttctgaatcggcagcggcgccagctcgttggaggtgatgcccagcaccgaaagaatctcggcttccacctcagggtcgctcagggtttcaacctggcctttgggctggctgatctccacctgaatctgcggcgtccccgcgtcagtcacccgcgcatcaacgcgcccgctttgggtccacagcgccaggcggtccttgtgcaacatgcccagttggtcgagcagccacaccgcgccgaccgtggcgtggccgcacatttccatctcatggttgggcacccagaaccgcagggcaaaatcaaactcgctgccggcaggagccgcaaagacaaagccgcattcatgcccgtaatcccgggcgacctgctgcatatctgcgtcgctcatgccatctgccacggccacggtaggcgccgggttgccgccacgagacgtggcgggaaatacattgaccaggtgaacctcgggcgtcatttcgcctctcccttgagggtggaaacagtcggcgccaccgcgtcgacgatggcattggtgtagacctgctgcgggtcgagtgacacagggtcattctcgacggcgttcatgaagctgatgttcttctcgataccgtcccgttccacacgcggcgtggccgggtaggacggcagtgaagcggtccaggccgcattgaaaatggcctcgtcggtgtgcgcaaagtacgggcgcaccgactcacgggccttctgcgggtcagcggcaatcaagtgttcggccttccacaaggcgcgcaccagtttctcggccgtcgccttgttgctgctcagccagtcttcgcgggcaatcatcgcagtgaagaggaaaccgtccaacggtttgtactcgcccttggccaggtccatcagcacaaaaccaccttgtttctcagccgtcgtgatggtcggcggcgacagcgagaagccattgatgctgccttgggaaaatgccgccaacatattcggcgcaccgccgaccggcatgatggtgaaatctttatcggggttcaaaccggcgtccttggccaggtaacgcaccagcatatcggtggtactgccggggccggtgacgccgattttcaagcctttgagggcctgggcgcgggctgccaatggcgaggtcgccgtcacaccggccttgcgcgccgattcaccgtcaatcaccacggtgctgccgaactgggtttgcacggcggcgaaggcctgcacgttctggcctttggtgcgcgcacgcaccgccacggcaggcagcccgacgtaggcatcggcgtcgcggccgagcaccgccgtcagcgccgccgagccgcctttttggaacacgatcacttccacattcaggccttcctcggcgaagtagccctgcttctgcgccacataaatcggcacatacaagaagccttcgctggggaacgcgagggtcaccttggtcaaatcctgagcctgggcggcgggtaaaacgcacgcgcacaacaggctggcaatcacgagacgcttaagcatgatggagctccacaacaggtagggttaaaccgcgacttcacgttcagcttcgttggctttccacggcatcagcttgcgctcggccagcttgaccgccgtgttcagaatcagcgccagggcaatgatccccaccagtgcggcaaacaccccggcggtgtcgaactgcgaggccgcgtccgacagcagataacccaggccacggttggccgcgatgatctcgcccaccagcgcgccgatcagcgcataaggcaccgacaaacgcaggccggtaaacacccaggtgaacgccgacgggatcaccaccatggtcagcaggtcgcgctccttggcgcccatcaggcgcaggatggtcagttgttcgcgggacacgttgcgcacgccgctgtaggtgttgagaaataccaggaagaacaccacggcggcagtcaggatgactttcatcggcaagccgatgccaaaccagaggatgaacagaggcgccagcgccactttcggcaggctgtagaacgcggtcaagaacgggtcgagaatgtcggcgagcaacgtggcccggcccagcaccaaccctgcgatcaagcccgcgagggagccgaagaaaaagcccagtaccgcctccagcgtggtgatgccggcgtgatagaaaaacaccccgttgagcaggattttccaaaggctctgggccaccgccgaaggccggctgatgaagaactccacgccaaaccagcgggagatgccttcccacagcagcatcaggaacacaaggaacagcaagcgataaacctggatcatacgacctccagcgagtgagccaatgaagcgggatcggccgcgcctgccacgtcgggcgccaggcgtttccacagttcggcgcagagttccacgtagcgtgggtcggcgcgcatttgcaccaggttgcgttcaccggtcagcgggatgtcgatgatgtggtcgatggtgccggggcggccggcgaacaccacgcagcggtctgcgagcgcgatggcttcatcaacgtcatgggtcacgaacagcacagttttgttgagcttacggcacaggcgcagcagttcggtctgcagggtcaggcgcatctgcgcgtcgagggcgccgaagggttcgtccatcagcaaggtttccggatcgctggccatcaaacgcgccatggctgcgcgtttgcgcatgccgccggaaagctggttgggatagctttcgccgaaaccggtgaggcccaccagggccatcagttcctcaacccgcgcctcgacttcggccttgggcatacgacgaatctgcaacggcaccgcgatattgccagccaccgtgcgccacggcagcaagtggtcggcctgggtcatgtagccgacccgcgtgttcacgcctttgacttcggcgccgtcgtaatgcacccggccttcggtggggccgaacagcccggcggtcatgttgagcaaggtggacttgccgcagcccgacgggccgaccagggtaatgatttcgccgcgctgaacgtccagcgacacatcgcgtacggccacaaatgggcggccctcgactttgaagcttttttgcacgcctgagaaatgaataaagggtcttgcgctcaccgcccctcctcgcccggtaggccggacttgtctgttgtgtgtgagcagaggatgaacgcatgacagatttgtggcgcacgggatcgggccggatcaagcgcgggatcgggacatgagcgagtacgatttcaactggaggacacaaatcaaatgtgggagcgggcttgctcgcgaatgcggtgtgtcagtcacttattattcgactgatacaccgcattcgcgagcaagcccgctcccacattttgatccgtgttgtgtcagctgcggcgccactcatccggcgaaatgcccagcacccgccggaacacatgggccaaatgcgacggcgattcatagccgacactgttggccacttccagcaccgacatgcgcgtatgccgcaacagcgtctgcgcgcgctccaggcgcaagcgctgcacataggccaacaccgtctcacccgtgtgcagggcaaacagccgggtcaaatgccggcgcgacatatggaacacgcccgctatttcatccagccccggcgcatgctccaggttaccttcgacatacgccttcacatcgcgcaccagcatggcgccgtgacgctcggtcgaggagcgttgcaggctcggctggctgagggaaatcgccaggcattcgagcaacagcaaatggtcggcctgggccagttggcggctgcggtcaacgtaggggtcgggttggctgaaggcctttttcgccagcagcaaatggtgcagcggcgcggaggtttgccagatgcccagggtgggcacgcgcagcaggcggttggcgcccccgcaaaggtcgcgcaaggcgtagtgcatatagtcgggatcgacgtagaacgccaggtggccctggctggcggtgagtgacgaggaggaatggctgcactgcggcggcaccagcacaaactggcggtcgaccaccgaggtggagcgcccgctgtcttcatccttgaagcgcagcaggccgtgctcgggcaccatcagcatgaactcgtcatgggcgtgagccccggtttcataggcgccgttggagttgaacacgctgtagatatcacgcatggccaggcactgccgcaggaggttgaaacctgacactagcatgtttggtgccagtgaaaagcagcgtccttgctgcaaaccttgttaagccagaggcacgcgacggttcgtcagtgcgaagcggccgacgaaaaagctcaaggccgcgcccagcagcaacatggccaaggtgctccaggccgcgcgggagagctgcttggccgcgacttcaccggcttcacgggctttctgctcggcttgctgtttcagctcatcgaccttttgcatggcttgctgatacgcctgtgcatagttatcgacgatctgcgtggcttcggctttgctcttgccggtgcgggcggccacgatgttgaccagtgcgtctttatccgcagcgttcagcgcaggctcgccagaggctttgacgcgttcgaaccattgcttcaactggtcggccgcctgggtcgggtctgtcgccgcatcggtagcagcctgcttgccgtcggccgcagcctggtcggttttgttttcgacgttagccgggttcagctcaggcttgccgctttgcttgagcagcgtgtcaagctggccttgcaggctgttccagtccagctggatgccctgctcgttcagttgctgcttgacgctgtcgccaatgcccggtgctgcagcagcgatgccgctaccggccgccgacaggcctttgcccaccacattgccggccgtgccgatcacactggcagccagcccggccagcagccaggtggtgagcaaggtggtcagggtccaggtgagcacaccgtgcagcccgccgcgatccggcgcggtgcgcccggccacgaaggcacccaggccgatcgacaccagcgtggacacaaacagccaaatcccggcgcccgtgccaaaaccgctgagagggttgccggccttcatcgggtcgacggcgctggcaccgatggcagtacccagcacactcagcaccaggtaggtcaccagggcaattgcactacccgcgagcacggagctccaggacacgcgaaacagcgaacggttggtttcatagacagtggtcatgttcgatcctttgacagtaattgaccgtttcagtctggcgagaccttcgcgtgccgtccccgctcaaatgcaccaggccatctggtgcattcgcaccccgcctgggagaacgtgtctgcactatcctgaaggccgggtgtcgtatttttcacgcccccacacccacggagaacctatgactcaggacgttcttgccaaggaaaccaaccgtcgccaactgcagcagatcatctccggtctgtctgacggggtgatcctggccgaagtcgaccaaaccattctgtgggccaatgaagcggccttgaccatgcatggcgtcgaggccgtgatggcgctgggcgccaacacccgggaatacgccgaacgctttgccctgcgctatcgcaataaccaccccgtgctgctggataactaccccctcgcccgcgcagcggcgggcgaagaattcagcgatgtggtggtggaagtcacgcccttgaacgacgaagagagaacctgggtccaccgcctgcgcagcctggtgatcaccgactcccacggcgagccggaattgctggtgctgatcctcagcgacgccaccgagtgggccagcgccgagcagcgctttgagaaaaccttcaacgccaacccggcgcccgccgtgatctgccgcctcagtgacctgcgctacatcaaggtcaaccagggctttctggagatgaccggctacaaccgcgaccaggtaatcggcaagtccgtctatgagctggacgtgctggagcaggctgaacgaaaggacctggccatccagcgcctgggcgaaggcgcgaccatcccgcagatgcaggccgaactgaaactgcccgagggcggcagcaaactggtgatcgtcgccggccagccgctggacatgaacgaggaagactgcatgctgttttcgttcatggacctggagccacggcgcaaggctgaaatcgccctgcgccagagcgaggagcgtttcgccaaatcattccgcctcacgccggtgccgactctggtgtgcagcgcgggcaaccgccaggtggtggatatcaacgaagccttcatgagcatcacgggctataccagcgaagagttgatcggcaaatccatcgaagacatcgactttatcgacagcgcccaggcacgcgcacagatgttcatcagcctggaaaaagccggcaacctcgacggccaggacctcaaggtgcgcaagaaaggcaatgaggtgatcgactgcgtagtgtccgccgacaccgtgaccatcgaaggcgtgccctgctacctgctggtgatgatgaacatcacggagcgcaaacgctcggagctggagttggtggcggccatcgaagaagtgatgcaggacgcctcatggttcagccagaccctgatcgaaaaactcgccaacgccaaaagcgtcaacagccccaacctgccgaacgtggcgttcaccgacctcaccgcccgcgagcgcgatgtgctgggcttgatctgcgaaggcctggcggacaaagagatcgcttcgcggctgaaactggcgcccaacaccgtgcgtaaccatgtggccacggtctattccaaactgaacgtgcacagccgcagcgcggccatcgtctgggcccgtgagcgcgggctgttcgccggtgaattgcgcctgaaaaacaagccgtaaagtgcaaatgcactagtgcggctagtgcgaattcgccttattgcggcgcggggcaagccataaccttcagggcatcacactgatgccctgaaggaacctggatgtttaccgtgtcccaactgagaaactgcatcgaagaaggcttgtcgcccctgacctgcgaattcaccttgtgccgggatgcgtccctgaccctcaaggtgttcgacgccgaaaccggccgggtggatttggtggtcaccggaatcagcaccaaccgcttgcagaccccccaagacgtggaaaagatggtcgaagagctgcgctacgagctgcacagcaacactgtgggcaagctcactctggatgatttgccttcaacgacgccccaatgaaatagaacaccccgcccaccgcgataaacgcccccagcatgtagaacatgctgtacgccggcaaactggccagcaccagcccgcacagcaccggccccagcgccgcgcccaggttggacaggttttgcgcgccgtaatacatgccccgcaggtggtccggggctatccggtcgataaacatgtattcggccgggaacacgataatctcccccagcgtaaacaccgccatcgccagcacccaccaccacacgctggtggacagtgcaaagcccaccaaccccagcatgaacatgcccaggcccgcgatcagccactggcccaggtgacggtgtgaaatgcgtcggccaatcacgtactgcaaggcaatcaccagcaccgcgttggtggtcagcacggcgctgaccacggtgtaggtgtaatccgccgtggtggtggtcaccaggtattgcgacagccacgcggtgaactgcccgtacaccacggcactgagcaacccgcccagggtgaagcacaccagccggtgatcgcgcagcaagacgcggccgacggcgaggaaagagatgggcttctgcgctgccggggcggtcgccagcgtgcggtcgccccaacgccagtacagcaggaaaaaccctgcccccaatagcgccgacaagataaacggcaggctgatatccagcttggccaccatggccccaaacgccggcccgaccgcgtagccgatgttggtgagggtgtacttgatggaaaacacttcgctgcgcgcctcgaagggcagcaggctggcgaaaccggccttgaccgcaatatcaatgaccgcatacgccaggttgatcaagatcaggcagctatagaacagccagatgccatgggccagtaccgtaccgacaaaccccagcacaaacagcgcgcccagggccagcagcagccgatagctgttgatgcgatcaacgaggaaaccgccgtacacgctgagcaaggagccaatgatcaaagaactgccgatcactaaaccgacctgcgtgatgtcgaggccaaagtgacgggagaggtaaatgaccaggtacgggaaggtcatcgccttggccaacgtgagcaataacgtggcgcacagcaacaagttcacggtacgggggtagtttcttattgtggcaagcatcctgctctcattgattaacggtaatgcggccatgacagccgcttaccttaacccaggaacaaggaaaaaacgcaggtcactgcttgacgggagtgatctcaaggatggtgccgttcgtggttttgagcagcacaaaccggtcgccgacccgtgcccactggctgtcggcctcaggctgcttcaggccgcgttttttccagtcgctgacggccgactctttgcgcatcaagatatccggggcgcggtcgccttccttgaggtcacgggtgttgatgcttgagggctttacggtttcctgtggcgtatcgccggcttgcacgacaaagctggcggtggacaggctggcagcaaccagcaggcaggcggcgagggttttggacttcatgggtgctccttcaatggatgacgcgtacccaggttccgaccacaggcgcgcggaatcattcagcctgctaaccttgcgccagccaatcctcgagtccgacaacaatgaaaacagccctgacccgaaccaagctccttgccagcacgctggtggtcgctgccgcgataggcggcgcggcgtattacctgattgaccggcaggtggtcacaggcctggtgggcggcacggactacagtgaagaccagttgaatgagggcgatgttgccgatatccacaccttgacactgccgcaagcgaaaaagcgcctgaactacctggtgcttgatgtgcgagacagccttaaccagatcgcaatgatggaaagcctgcgcctggaaatctccccggcgtcaaaaaccgacaaggcgcccgcggagcaaaaagagctgcgctatgacgagccattcgtgcccttcccggctgccgagctgaaggtcgcattgcaaaccctgcaacaacacccccccgcgtttgatcaagtattcttcgacaaccagtcggggctcacgctggacgtggagccgatccgcgacgtactcaagcgcggcgccctgcccgacaggcgccatgaagaacgctacgccgtgcagacactgtattggcgcgatggctcgcagcagccgtttgccgaagccggcgtcgaagaggccgaagcagaggacaccaccaaggccgagctgaaaaccaataagccgctggagcgcatcggcgtcgccctcacttatcaaacctatcccgccttcaagaaaatcgtgctggatgcggcccatccaaaggcttcgggtgaagatggcgacacttacaaactgacagcattggcggacgatcgcgcctccctgctgttggccacacccaagaacaaaaccctggtgattcagggcctcaccgccgacggcaaaaccctctacagtggcggcagcagttccaattcctcccccactgccgagcaaaaagacaacctgcacgcctattacgacgaactgctgcgtgtacaggccaacgtctccagctacacagacagtgccgcgctccagcaacacctggagcaattcgccaaaagcctgccggacaccgccagcgccctttccaacgtgcacgccacctatcacttcgaagacaccccggcgagcatcgtgatctatctgctcgaccccgcccaaacgcaaaccctgacgctgcagatgcacaacagcgtgccggcccaggcgcgttacatcgcctacgacaacgccacggaaaaaaccggctttatcgacaacaagggccagtgggtggtcaagccgcgctttgaacgcatcgaatacacccagatgccgaacgtgtaccacatgcaggtcggcagcacggcgcagaaagacggctggagcgaactgcacttcaagtactttgcgttcgcgcccggtacgaatgtgctcaaggagctgccgttcgacatcatcgaaaaaccgatcaacgacaacctgatgatcgtcgagcgcgaaaccaacgggccttacggcgtgtacgacgtgaagaaacagcaggtcgtggtgccgatgaaatacgtcaacgtggaggtggtgggcgacttgttcattggccgcccgggtctgaaaacctacgagcgtgaagcggattacggcgtgtggaacctggccggcaaggaactgctggcaccgcgtttttccagcattgaagtgatcggcgacaacctctacaccaccacgggcgaaggtcagcaaaaagacgtctacaccctgaaactgcaaaagctcaacccgccgggcaccaccaccgtcggcgcgtttatcgggggccagccgcaactggtgcaagagcgcaaaacccgcacattcagcctgatcaaccctcagggcaaaaccctgtccatcagcctgccttacgacgaagtcgagcccttctccaacggcatggccgtggtgaaaaagggcaaccgctacggcgccgtcgacaccgaaggcaagctgcgcgtaccgctcaaatacaccaccctcaacgccttccagaaaaacctcgcctcagcggaaatggaaggcttcaagggtttggtgctgattgacaggaacaacgccgtggtaaaaaaactcggctcgtacaccacctacaacacgccgaccaacagcaatgacgccacgtacagcatctgggatgaaaccgaggaaaaccgcgtgaatgtgtttgatgccgatggggtacaggtggatagctacgaacgcgaataaccgccttgatcaagattggggccgcttcgccccccagcgggagcaggctccctcgccacaaaaagctgatagcgattgccgccatgaaataaatcctgtaatttttcatgaaattattcgacatgaatttcatgaacaaacaagaagaactcgacgcgctcgccgtgctgatccacgacctgcgcaaacacaagaagctcaccctggcccagctcgcgcagaagatcgagcgctcggtcggctttgtgtcccaggttgaacgcggactgtcacgccccaccgtggctgacctcaccgccatcagccacgccctcgacgtgcccaccacctacttctacagcctgcccaagcccaagttggtggaatgggtcacgcgccccaacgagcggcgcacggtgtattacgccaatggcatcaccgacatcctcgtctcgcccagcatgaacggcgctttctcgatgctcgacagcctgttggcaccgggcgccaacagcggcgaacagaccatgagcgaccgcgccgaacaggccggttttgtgctcgaaggtgaactgacgctgtgggtcgaaggcgaagccgattcggtaacgctcggcgccggcgacagcttccacctcgccagtttcgcccactgccgctatgccaacctgaccgaactgcccgcccgcgtgctgtgggtttacaactaggagcaacacccgtgaaaagccattcctccacgttgctggccgaagtacggacctttcgccagaaccaccccgacgtgcgttacgttgacctgatcgccctggacattcccgggcatttctacggcaagcgctacccggtggagatgctggaaaaggtcgccgccggcagccccttgaagctgccgcaaaacgccgtgctgctgggggttcagggcgggctgttcaagattggcgactattgcttcaacgatggcgacccggatgccaaccgccgcttggtgcccggcacgctgaagccggtgaactgggaatcgcagcctttggggcaaatgttgatcacctccgacggcaccgaagcgccgatcgaattcgaaccccgcgaagtgctggccaaggtgctggagcgcctgcaacacaaaggcattcacccggtggtggcgttcgagctggagttctacctgttcgacaaaaaactcgaccatggcctgccgcagttcgcccgcgacccattgagcgaggatgccgacgaccagcccaacctgcacatcgagcgtctgtcgcgcttcagtgacgtgctcgatgacatggcgcaaaccgccaaggaccagggcatcgacatcaccgtgatcaccgccgaaatcggccccggccagttcgagatcaatttcggccacctcgatgacggcctgcgcgccgccgactgggccgccctgttctgccgcagcacccgtggcgtggcactcaaacacggctaccgcgccagtttcatggccaaaccctatctacaataccccggcagcggcatgcatgtgcatgtcagcctgtatgacggtgcgggcaacaacctgctggcggcgcaccagcagcaaccgctgcgtcacgccgtggccggttgcctggagttgctgccccactgcatgccgattttctcgccgaaccacaacgccttccgccgcctgggcggcacggtcaacgccgcgacccgtgccagctggggctttgaagaccgtgacgcctgtgtgcgcattcccgagtccgacccgcgcaacctgcgcatcgagcaccgcctggccagtgccgacgccaacccctacctggtgctggcagcaattctcgttggcctggagcacggtcttgaggccaagcgcgagcccatcacgcccttgaacgaggaccgcaccagcggcaccgacttccccctggaaatgctcgacgccgtacacgcgatgaggcaccaaccggtattgcgcgataagctgggcggcgaatttgtcgacgtgtactgcgagaacaaacgccaggatcacttggccttccagcaagagattcacgcacgggaatatcgctggtttctctaaccctcaaccggactcaccgatgaccgaccaaagcgccccggccctcaaggaaatcttcaacgttgaacgcctgcggcacatcgccaccgagatgacagcggtgtaccccgcgttcgacgccaagggtttcctcaaacacgccaccgccgggctggccgagctgtcggtgatgcagcgcatggcgcgggtcagcgaaagcctgcacgcggtgatcccgctggattatccgcagaccctcaagctgcttcacgccctcgcgccgcgcctgaacagcggttttgtcagcctgttcctgccgcactatgtggcgagttacgggagcgaagacttcaagcattccatggcggcgctcaagtttttcacccgctttggctcgtccgaattcgccatccgccacttcctgctgcatgacttcaagcgcaccctggcggtgatgcaggattggtcgcgggatgacaacgaacatgtgcgccgtttggccagtgaaggttcgcgccctcgcctgccgtggtcttttcgcctcgccgaggtgcaggccaaccccgaactgtgtgcgtcgatcctcgacaacctcaaggccgacagcagcctgtacgtgcgtaaatcggtggccaaccaccttaacgacatcaccaaggaccacccggattgggtgctgagcctgatcgaaggctggtcgctggagaacccgcacaccgcctggattgcccgtcacgccttgcgaagtctgatcaagcaaggcaatacccgcgcgctgacgatcatgggagccggggccagggccgaggtaaagattcacaaccttgaggtcacaccgccggtgatcaaactgggcgagcgcatcaacctgtcctttacccttgaatccaccgccgccaccgcgcaaaaactggtggtggactacgccatcgactacgtaaaaagtgccggtcacagcgccgccaaggtgttcaaactcaaggcattcagcctaggcacaggcgagcatcagcacattcggcgcgagcaacatatccgtgagttgaccactcgcaagcactaccccggcaaacacgcggtgcatattttgatcaacggcgaaaagctcgccagcgccgagttcgaactgctgaaaccctgaccttaatcaaagaaaaggctctagaacgggcctttcagctatcaggattgtcgaacaatcctggatttttcagttgcgatccattatcatccgccgccttctcgctacccgacgggtagttgtttcaatgtgtcacccgaggcgcccatgtaccgtttttcgtttcaccgccctttgcttgccatcagcctggggctcgtctcccattgcgtttgcgcagcgttgcaacccctggccgaagccccgctggccagcgacaccgagctgcattgccacttcaaccacgacgccagcaccgactgcaccaccacctaccgctacacgatcctcaagcccaatggccgcgaaatgctctcgcgcatcgacttcgactactccgaaggcgacgcctttgaagtgatcagcgccgagtccacccaacccggcgccaagccggtcaagctgggcgccgcgcaaatcgacacacgcaccgcgcccaaccccgaccaaggcttcagccgcgacaaacagacgtcgctggcctttcccaacctgcgtgtcggcacccaaattcgctacaccgtgcgcgaacaccgtgccgccaaaccgctgatgacccaattccactacgccctcaagttcggccccagcccggcccgccgtgatcgcttcaaggcgcgctttaccgcagaacggccgatccagtggcgcagcgagctgttcgacggtttcaacgtgacgccatccgctgacggcaaaacgttggacgtggtgcaaaaaaccccgacctacttcaactacatcaacgaatcttccattgctgccctgctggttattccgcgcctggaagtaggtagcgctttggatcgccaagcgtatttcggtgacttcgcccagcgctacaaccagattctcggcgccggcctgccgccgcaaagtgccgctgcggtggccgccgcgcgaggcttgccacccgccgagcaggtcgccgcgctgatgcagcacatcaacgatcactaccgctacctgggcgactggcgcgcctcggagcgcggctatgtacccttcaacctggcagagatcgaacagcacggttacggcgactgcaaggacttggcgaccctgctgaccgccatgctcaaggccagcggtatccacgccgaaaccgcgtgggtcagccgcggtgacgtagtggaatccctgctgattcccggcaccaatgcgccgaaccacgctatcgtgcgtgccgaggtggacggccaggtctggtggctcgacccgaccaacccggtgttcgccccgggccaggtgatgcccgacatccaggaccgctgggtactggtcaacaatgccaagggtgaagtgcgcgaagaacacatcccgctggaacgccccgaaaccactctgcgcctggacaaaacagtgcacctggataaacagggcaatggcgcaatcgaggccaccatcaccttcagccgcctgccgctgatgcacctgagcgtcgccgaccgccagcaaggcagcaccgccaccgaccaaaacatctgcgccaacttcggcaacgacatcagcgactgccacatcacccgcccacccaccgcgtttgtggtgcacgacggctacaccgtcaacgcccgactgaacgaccagcgcgccctcgaaaaactggccaacgactacgtctacaccgacccgttgctgaaggcgcagtgggaaggtttcatcaactaccgccgccacgggcaacaggctgacctgtatatgggcaaccctgaaatcaccgactacaccatcaccctcaccggcgggcagatggaaaaagccatccccggctgccaggtccgctcgccgtggtacgacttggtgctggaagggcaacgcaaggacggtgaattgcgttaccactacctgctgactcagaaaaagcgctggctgacccatgctgaaattgccagcgaggcgttcggcaagatgattgacgacgcacgagcgtgtgcggagcaggtgcatcaggtggtgaaactctaacccccgacgcggtttataggtgggagctggcttgcctgcgatagcggtgggtcagcttgcacatttatcgctgagataccgctatcgcaggcaaaccagctcccacattttcaatccatcgtgtcagttggactcgcccagcaacaacccctgctcccgcgcgcacaattccaccacgtaatcccacaacacccgcagccgcaccgacttgtgcaattcccgccgcgagctgatccagtaactgcgcgatatcccctcccccggcagcaacggcaccaggtccgggtcacccgccgccataaagcacggcaacacggcaatacccaagcctgagcgcgccgcctggtgctgggcaatcacgctggtgctgtgaaacaccacccgtgggttgcggcaaaaactgctgagaaacttcagttcctggctgaacaacagatcatccacgtaatcgatccacgcatgggccgcgaggtcttcgcgtttttcgatgggtgggttgcgctccagataggcgcggctggcatagagcgcgaggcggtagtcggtgagtttgcgtgtgacgagctggtcgacactggggcgttcgaggtggatgctgatttccgcttcgcggttgaggatgctgacaaagcgcggcacggccaccagttccacttccaaccccggatagcgctcaaacaacccgcccatgcggctggcaaggaacatcacgcccaacccttcggccacgccgaggcggatcttgcccaggggtgcggccgaatgggtgagttcgtcttcggccagcaaagccacgttttccatggcttcggcgtgtttgagcagggcctcgccggcgggggtcagctcgtagccctgggcgtgctgcacaaacagcgcggtgccgaggcttttttcgatagcctcaatgtgccgggccacggtggcgtgtgtggttttcaggcgctgcgcggcggtaagcaggcgcccgctgcgctgtagctccagaaaataccgcaggtcattccagtcgaacatgtcgcctccaatgcgagagcctgggccgcactgtttaaaaacgcacagcagctgggtaaaaactaacatttttaagacgaaaactaacaactaggatggagccaataagaaaaacaagcgagaccccagatgcccattgcagctgctgattacgattacgtggtagtaggcgccggccccgcaggctgcctgctggccaatcgactgtccgccaaccccgcccaccgcgtgctgctgctcgaagccggtggccgcgacaactacccctggatccacatccccgtcggctacctgttctgcatcggtaacccgcgcaccgactggtgcttcaagactgaagcccaggaaggcctgcagggccgtgcgctgagttatccgcgtggcaaggtactgggcggctgctcgtcgatcaacggcatgatttatatgcgcggccaggcccgtgactacgacggctgggccgcagaaggcaatgcaggttgggcctggaaagacgtactgccgcagttcaaacagagcgaaaaccattttgctggggagtcggagtttcacagcgacggcggtgaatggcgtgttgagcaacagcgtttgcactggccgattctggacgcctttcgtgacgcggcggcgcaaagtggcatcgcatcggtcagcgatttcaatgagggcgacaacgaaggctgcggttactttcaggtcaaccagaaggccggggtgcgctggaatgcggccaaggcgtttctcaaaccgatccgccagcggcccaacctcacggtgctgactgacgtggaggttgaccgcgtggtgctggaaaacggccgggcgtcggcagtggtcgggcgtcagcacgggcagcaagtgagctggaaggcgcgcaaggaaatcgtgctgtgcgcaggctccgtgggctcgccgggcattctgcagcgctcgggaatcggtccctcgaacatactcaaacccttgggcatcaatgtgctgcatgaactgcccggcgtgggcggcaacctgcaggatcacctgcaactgcggctgatctacaaactggaaaacgcccggaccctgaaccagatcgccggcaccgtatggggcaagatgggcatgggcctgcgctacctgtatgaccgcagcggtcccttgtcgatggcgcccagccagctcggcgcgtttgcccgctccggcccggagcaaacctcggccaaccttgaataccatgtgcagccgctgtccctggaacgcttcggcgaaccgttgcacgccttcccggcatttaccgcatcggtctgcgacctgcgcccgcaaagccgtggccgtatcgatatccgctcggcgaacccgggggatgcgccactgatccggcctaactacctcagccacccggaagacttaagggtggccgccgatgccatccgcctgactcgccgcattgtcggcgcgccagccctacgcccgttcaaaccggtggaatacctgcccggcgactcactgcaaaccgaagagcaactgcacgaagccgctgcgcgcattggcaccacgatcttccatccggtgggcacctgccgcatgggcgatgacaaggacgcggtcgtcgatgcacaactgcgcgtccatggcgtgcccggcctacgtatcgccgatgcctcggtgatgccacggatcacgtccggcaacacctgctcacctacactgatgatcgcggagaaagccgcgcacatgatcctttcgccgaacacaaggaaccttgcccccgagaaagaaccggctcatgcaatctgaatagcggcgccccaccgggcgccgacagtggaacaacaataaataatcactgtgagggatacccgatgtcagaacatgctcaacccctgggctcggcgatcgacgcgagcacccgtaacgactcaaagaaggtcatcttcgcctcctctctcgggacggtgttcgagtggtatgactttttcctctatggcgccctggcggcggtgatcagcaagcagttctttgccggggtcaacgacaccacggcgtttatctttgccttgatggcctttgccgcaggcttcgtggtgcggccgttcggcgcgctggtgtttggccggctgggcgacatgatcggacgcaaatacacctttctggtcaccattattctgatgggtgtggcgaccttctgcgtcgggctgttgccgacctacgcaagcatcggcattgccgcgccgatcatcctgatcgtgttgcgcatgctgcaaggcctggcgctgggcggcgaatacggcggggccgccacctatgtggccgagcatgcaccggctggcaaacgcggctttcacaccagctggattcaatccacggcgaccctcggcctgctgctgtcattgctggtggtgttggcctgccgctacttcaccggcgaccagttcgaagtgtggggctggcgtattccgttcctgttttcgattgtgctgctgggtatttccacctggatccgcatgagcctgcatgagtcgcctgcgtttctgaaaatgaaagaggaaggcaaggccagcaagtcgccgatccgcgattcattcggcaaatgggaaaacctcaagatcgtgctgatcgcactgttcagcatcaacggcgggcaagcggtgaccttttacgcggcgcagttctatgtgctgttcttcctcacccagttcctgaaaatggacccggccctggccaacatgctgctgatcatcagcgtggtgatcggcgcaccgttcttcattctgtttggctggctgtcggacaaggtcgggcgtaaaccggtgttgatgctcggcctgctgctggccaccgcgctgtacttcccgatcttcaaaagcctggcgcactacaccaacccggcgatggaccaggccagccaccaggcgccgatcaccgtgctggccgaccctgccacgtgcaccttccagttcgacccggtgggcaaggcgaaatttgacagcccgtgcgacaaggtcaagaccttcctggtcaagcagggcctgccctacagcagcagcgctgccccggcaggcagcccggtgcaggtgagcgtgggtgacgtgcgcattgatggcttcgacgaagcggccctgcgcggtgccgtgaccctggccggctaccccagttcggcggatgtggcgcaggtcaacaaaaccatggtggtggtgctgatcgtggcactgatcctgatcgcagccatgtgctacggcccgctggcggccttgatggtggagttgttcccgacgcgtatccgctacacctcgatgtcgctgccctaccacatcggtaacggctggtttggcgggttcctgccgaccgtgtcgtttgccctggtggtctacaccggcgatatcttctatggcctgtggtacccggtggtggtgaccggggtgagcctcatcgtggggttgttctgcctcaaagaaacccggcatgtggacatcgacaataactgatcttccaaccctgaagatcccctgtgggagcgggcttgcccgcgattgcggtgtgccagtcgatagattcggcactgacaggacgccatcgcgggcaagctcgctcccacatttgttttgcgctgaccacacaaattgctgtacatccatacagataatggttgatctaagctcttcgactgagcatcctgcaaggcatcaacccgatctgatgtgatgagcatgcagctgtacctctgtgaaaaaccttcccaggccaaggatatcgcggccgtgcttggcgccagccgccgcggcgacggctgctgggtggggaatggggtcacggtcacctggtgcatcggccatttgctggaaaccgccccgcccgacgcctacgacgccaaatacaaacgctgggtactggctgacctgccgattgtcccggaaaaatggaagatgcaggtcaagcccaagacggccagccagtacaaggccgttaaacggctgctgggggaagcccaggcgttggtaatcgccacagacgccgaccgtgaaggcgaaatgatcgcccgggaactggtggagcattgccgttatcgcgggccgatccagcggttgtggttgtcggcgctggacgatgcctccattcgaaaggcgctcgcgacactcaagcccggcgccgagacgttcagcctgtatcactcggcgttgggtcgctcgcgcgccgactggctgatcggcatgaacatgagccgtttgtttaccttgctcgggcgccaatccgggtatcaaggcgtgttgccggtgggccgtgtgcaaaccccaaccttgcgcctggtggtggaccgcgaccgcagcatcgccgatttcataccggtggcttactgggccatcgatgtcgacctgcaccacgaacgcatgaccttcaccgcccaatggcgcgccgccgaggatgcctgtgacgatcagggccgctgcctcaacccgcaactggcccgggatgctgccgatgccatgagggacgctgccactgcgcggctggccaaactgcgaaccgagcgtatgcgcgaggtcgcccccctgcccttcgacctgggtaccttgcaggaaatctgttcgaagaagcttggcctcggcgcccaggaaaccctggacatcgcccaatcactgtacgaaacccacaaggccatcacctacccgcgcagcgattgcggttatctgccaatgagccagcacagcgaagcgccaaaaatcctcgcagcgctggctagcgcggacgcggcagtgaatgagctgatgccgcatatcgacgctcaacggcgctcgcgggcgtggaatgacgccaaggtcagcgctcaccacggcatcattcctaccggcgcaggcaaggatgtcagccagctcgccggtaaacatcgcgcggtctacaccttgattcgcgcgcgctatctggcgcagttcctgccaaaccatgaatacgaccgcacccatgcggatttcgactgcgcgggttttgcgctgcgcgcggtgggcaaagtcgtgatcgaaccgggctggaagcgcgccctgcccgaagcgctggcaccggcgaaagggcgggaagtgccggcaccgcaagccttgccgatgctggtacagggccaggattacgcggtcgccaaggtcaacctcaaagacctctggacccagccgcccaagccgttcaccgaaggcgacctgatcaaagcgatgaaaaacgtcgccaagctggtggaggacccgctgctaaaacaaaaactcaaggacaccaccggcatcggcaccgaagcgactcgcgccgggatcatccaggggctgctggaccgtggttatctgatgaaaaacggcaaggcactgtcagccacgccagcggcgttcagcctgatcgatgcggtgccccgcgccattgccgacccgggcaccacggctatttgggagcaagcgctggacatggtgcaaagcggtgaaatgagcctggaggaattcgtggccaaacaggcggcctggatgagtaagcaggtggcgcgctgcaacggcatgcgcatgaccattaccggcccggcgagcccggccggtcgaggcgcagccccctggaaaaagaaacgcaaggcggcaccgcgcaagacggcagccagccccaagcgcgcgaaaaagccctcaaccgccgggtaaacatcgaaaaaatccggtgaatgacgtttttcgacgggtttgatgccgctttggaccttgctccgccacaggccgtctaggattctgtaggggaccgtgtctactaacaacaacaccggagtggccgccatgaaaaccgtcgcagaagtgctcaaagccaaggaccagaagaatcaggaagtccatgtcatcaaacacgaccacaccgtgtttgaagcactggtccggatgtcggagaaaaacgtcggcgccttgccggtcgttcaggaaggcgtggtggtaggcatcatcagcgaacgtgattacgcacgtaaaatcatgctcaaggggctgtcgtcggtcaccaccaaggtccatgaagtgatgagctctccggtgatcaccgtcgacactcataaaaaggtcgatgaatgcatgaacatcatgaccgacagtcacctgcgccacctgcccgtggtcgaagacggcaaactgctgggcctgctgtccatcggcgacctcgtgaaggaagccattgccgaacaggcagagctgatcaaacagctggagcagtacatccgcggcgaataggggaacccatgctcgacacgctggaacatcaagaggaccacctcgacaccctgcaccgggccatggccgaacggcgctttctggtgctgaccggtgcggggatcagcacgtcgtcgggcattccggactaccgcgacagtgagggcgtgcgtcggggcaaggcccccatgatgtaccaggaattcctggccaccccgcaagcgcgccgccgctactgggcccgggcaatgctgggttggcctcgggtgcgcatcgcgcagccgaacaaggcccacctggcactggcgacactgcaggaacgcaagcgcatcagtgggctcatcacgcaaaacgtcgacaccttgcacgaccaggcaggcagccagggcgtgatcgagttgcatggcagcctgcaccgggtactgtgcctggactgccaactgcgcagtgcccgggacgtgattcagcgccagatggaaatcgataacccgtacctcgcccaagttcatgccgttcaggccccagacggggacaccctgctcgacccgacgtttgaagagcacttccaggtccctcactgcccccattgcaacggcgagcggctgaaaccggatgtcgtgttttttggcgaaaacgtcgctccgccaacagcagcaagcgccatggccgctgtggagcacgctgacggcttgctggtggtgggctcgtcgctcatggcctattcggcatttcgcctgtgcaaagcgatggtcgagcaaggcaaaccagtcatcgccatcaacctgggcaagacccgcggggatgagttgttgcaggtcaagatcgaagcgtcttgcgagcggttgttaccgttgttagtcgagcgaatgcagtaacgagaacacaccccatccaaatgtgggagctggcttgcctgcgatagcggtgggccagcctggtattcgtttactgacacaccgctatcgcaggcaagccagctcccacaggaaatcaacgctgaattacccccaagtgccctcgacccggcgcgcagaaaatgacgcacaagtcacgttttccggcattctcccgtccccacagcaatttatgtagtgatcaaaaataatcactacataatcgttgacgtaacctttttgtccttgcattatcgagacgtctcccggatcgggagcgttggtaacaagcgttttgaaagagctcgtctgaccgccgagctgttttttccggatgtgcactgcccacaaggcagattgatgaagctgaccggcctgaaaagttcggtacaaggagctcaaacgccccttgtcttcgttatgaaaccattgcgtagcagttcatcagcgagactacatgcatcaggttcaagaccctgcccgtattcggcagaccgtcactgacgcccggttttcggaaccggagacaactaagcagttttaacgaaccaactgatagatcgccaactggtcaaggggcttacacatgaatctgaacaaccaaccaactatcgatgaattggctgagatgttcgcagcgcagaaagacacactcgacgaccatatcctgtggattggcaaatcgggcgaagtccaaattgactgcctggcgccccacgccgaagaagccgagttcgaccgtaaccaccgtgaactggcggcacgcctgaagatgtaccggcgtggccagggctatgtgggcaagaaggcggctgccgatcgcaactttatcgaacaggtctttcatacacttaataccgaatggcagcacctcaaaggccagtcgaacgttaaagtcattgatagatactgctgataacacagccttaaacatttaagcccgctcgtttattcgagcgggctttttaatatccaatcctgattaactttataacaaagcgggaaaccggcccttactggcttcatcgcaaaaaatatcaaacaacacctgcgccgccgcagacagttcatgcccgggcttggtcagtacgccaatcggccgctcaatgaccgggtcactcagggtgatgcaatgggcgcccgcctcctccatctgccgcgcgcacaacgcgggaacggcgctgacacccaaaccactggcaaccatcttgcccaccgtcgccaattgatggctttccagcgccaccggtaacttcatctgcaaagcgcccaggtgctcctccagcatcacccgtaccgtggacggccgttgcagggtaatgaagggctgctccagcagggtcttccagtcgatttcctcgcactgtgccaacgccgaatcccccggcaccacggcgacaaaacgatccagatacagcggcgtgaacgccaaggacgaactttcggacggttcgaacgccacgcccagctcgacctgacggtcgcggaccatttccagcacctgctcgttgatcaagtcgtgcaccgttacattcacctgagggtaacgtgcgcggaatatcttcaggattggcggcagcaggttccccgcaaaagacggcatcgctgccaccgtcacacgcccgcgttgcagcgtaaaacgctgacgcagttcatcttcggcattgtcccaatcggcaatcaaccggcgtgcaaggggcaacagggattcaccttcgggggtcagcgccacgttgcgcgtgttgcggctgaacaggcgcccgcccagcccttcctccagacccttgatggtcaggctcaacgctgactgggaaaggtgcagccgctcgcaggcagcggcgaaactcaggctctgggccacggccagaaaagcccgcatctgtttgacggtcaaggcgctactccggagggtgaatcgactatgctgttttttaaatcaatcaaccttaaaaaacaacttaacaaatcaatccgtcagcgcaacactcagatcactggctggaccacaaacaataaaagaggtgcatatggcaggtttcgataaacgcgtggcgtcctatgaagaagcgctggcaggcctggaggacggcatgaccgtactctccggcggttttggcctgtgcggtattccggaaaacctcatcgcagagatcaagcgcaaaggcacccgcgacctgaccgtggtttccaacaactgcggcgtcgacggttttggcctgggcgtattgctggaggaaaagcagatcagcaaagtgatcgcctcctacgtcggtgaaaacgccctgttcgagaagcaactgctcagcggcgagatcgaagtggtgctgacccctcaaggcactctcgcagagaaaatgcgtgcaggcggcgccggcatcccggccttcttcaccgccaccggcgtcggcaccccggttgccgagggcaaggaaacccgcgagttcaacggccgcccgtacctgatggaagaatccatcaccggcgactttgccatcgtcaaaggctggaaagccgatcacttcggcaacgtcatctatcgccacaccgcccagaacttcaacccgctggccgctaccgccggcaagatcaccgtggtcgaagtcgaagagatcgttgaaccgggcgagctggatccggcgcatatccatacccctggcatttacgtcgatcggattatttgcggcaccttcgagaagcgcatcgaacagcgcactgtccgcaaataacctgcctccagcccgaacaacaaggacacacaaaatggctcttacccgcgaacaaatggctcaacgtgtcgcccgcgaaatgcaggacggtttctacgtcaacctcggcatcggcatcccgacactggtggccaactacattcccgaaggcatggaagtcatgctgcaatcagaaaacggcctgcttggcatgggcccgtttcctaccgaagaaaccatcgatgccgacatgatcaacgccggtaagcaaaccgtgactgcgcgcatcggggcttcgattttttcttcggcagaatccttcgcgatgattcgcggcggccacgttgacctgacggtactcggtgcctttgaagtggacgtgcaaggcaacatcgcctcatggatgatccccggcaagctggtcaaaggcatgggcggcgccatggacctggtggccggcgcggaaaatatcatcgtgatcatgacccacgcatcaaaggacggtgagtccaagctgctcagccaatgcagcctgcccctgaccggtgcgaactgcatcaagcgtgtattgaccgaccttgcctaccttgaaattgaaaatggcgcttttgtcctcaaggaacgcgcgcctggcgtcagtgttgaagagattgtgagcaaaaccgccggtaaactgatcgtcccggaccacgttccagaaatgcacttccagtgaggacagattccatgcaagacgtcgtgattgttgctgccacccgtaccgccgtgggcagcttccagggttcgctggcgaatatcccggcaccggaactgggggccgctgtcatccgtcgtctgctggagcagaccggtctggacccggcacaggtcgatgaagtgatcctcggccaggtgctcaccgcaggcagcggccagaaccctgcgcgccaggcatcgatccttgccggcctgccccacgcggtgccggcgctgacgttgaacaaagtctgcggctcgggcctcaaggcgctgcacctgggcgcccaggctatccgttgcggtgacgcagaagtgattatcgccggcggcatggaaaacatgagcctggccccgtacgtattgcccgcagcgcgcaccggtttgcgcatgggccacgccaagatgatcgacagcatgatcaccgatggcctgtgggatgcgttcaacgactatcacatgggcatcaccgccgagaacctggtggacaagtacagcatcagccgggaagcccaggatgcgttcgcggcagcctctcaacagaaagctgccgccgccattgaagcgggccgttttgccgacgagatcacaccgatcctgattccccagcgtaaaggcgacccggtggctttcgccgtggatgagcaaccacgcgccggcaccactgccgaatccctggccaagctcaaacccgcgttcaagaaagacggcagcgtcaccgccggcaacgcctccagcctcaatgacggcgccgctgcggtgctgctgatgagcgctgacaaggccaaggcccttggcctaccagtgctggcacgcatcgccagctacgccaacgcaggtgtggacccggcgatcatgggcatcggcccggtctcggccacccgccgctgcctggacaaagccggttggaacctgggcgacctggacctgatcgaagccaacgaagccttcgccgcgcaatccctggcagtgggcaaagagctggaatgggacgccgacaaggtcaacgtcaacggtggcgccatcgccatcggccacccgatcggcgcctcaggctgccgcgtgctggtgaccctgctgcatgaaatgatcaagcgcgacgccaagaaaggtctggcaacgctgtgcatcggtggcggccagggtgtagccctggcacttgaacgccactgagcttaaagagcaacacgagaaaaggcccggttccacgaaaaccgggccttttctttaccttgcaatattcctgaataaacacgaatccactgtgggagctggcttgcctgcgatagcggtatacctgcgccggacaggcaagctggcccaccgtaatcgcaggcaagccagctcccacggtgggccggtgttgtcagtcgttccggggcaccgcaaacaccgcactcgcccgcgccactaccttctctcccacctgcaagctgaccgtggcaaacgccatctgccggccgcgcttgtgatgttccacacgcaccacaatccactctcccacctgcacggcccccaagtaatccagcgtcatgcttgccgtaatcagcggcaacggcggatcactggaaaacgccatcgcgtaacccatgccgacatccgccagagtcgccaacaccccgccatggacggtaccacgcccattggcatggcgattatcggcccgcaggccgatttccagttgcaggccttcgccccggcaataggccgggccgagcaaatccagcagcgggctgctgcgaggcagcgagacaaaaccttcaggcacggcatgagcgatcatggtgagttcctccttggagacagaaccgagatttaacccaccccatcgctcaccgccaccaccatcacccccaccaatcatgggtgatcagctaacgcttcatgcagcgctgataccgctcatctacccgcttcgcaaaccacgccgtggtgagattgcgggtgatcttcggactcttgagcacaatgcccggcaggatcgcccgtggcattggcttgcctgctgccttgtcagccagggcaaacacccgcttgtagagcgtcgtatcctcaaagtccaactgctcgccctgctccagctggctgcggatgctcgggttgcgcatatccagtttcgcgcccagggaacgcaccgccaactcggtggtgcctggcaacaatgagccgtagcgaatcaaatccccatccaacgccagatcggtgcctgtgacgcggctgacggctgcctggaacgcagcattacggctggcgtaccaaccggcattgaagtcggcgaagcggtacagcggctggtcataactcaccgggtaaccgagcaagtgggcaataccgaaatacatcccgccgcgacgggtgaagacttcgcggcgaatcgagccatcaaccgtgtagggataatcccgtgcctgtttttgcgcaaactcgatactgacctgcatggggcctgcggtatgcaccgggttgaagccaccgaacaacgtattgcccaagggcaccatgctgatgaaatcgtcaaaaatgccgctcaggtctttctccgtgcgtgcggcgttcaaacggtcggcgtaggactttccagtaggcgaacgcaattgcagtgtggtgcgcacaacgaaagccggcacatggacttttcccgcccgtcgcaggatctcgtcctgagcgatcttgcccatgttcggcaccgccggatcaacctgatacgtggactcttgctcggttaccgccagcacggcgcagatgttctcggtgcccggatagattttttgtgcatcgaaggctgtgtagatgtcctgcgcccaaccgttgcgatctgcaaccgtggttggcagcaggcgcacgatctgcgccttaacctcagcctcactgcgctcaggctgctgtgggccgcgtggcgtagagcaaccggcgagcaccagcaaagcagtgaggcagacaatcagtcggcttgaagacatggggcttccttgggtaacaacgggccgggtatcgcggatatcgacaggtaagtctaaccggggttcgccaccctgctgcaatcgcgacttactaccgaacgtaactgcccctgctaccgattgactgagcggacaaggattgctgaaacgtcccacattctccagcgcattacgccgacttcttttccctaccaacctcgccaaagtctctcgccagatccatccgtgcgagggaacgccaatgtacttctccgttaatgccctgcccataggggctgccttttgactccggtcattgccaggtttgtgctggcgcccatggatgccaaggcgcccgacgttgaaagcgtctttcgtgatttcagggattgcctgaacacctttgatgaatgggccgaaagcttctggagcagctcgacactggatgtcgaacaggtgttcaaagtcggggaagaggtcgcacttgtggcaccggtttcctccaaggcaccaagccgcaccattgccgtatgcaaagcccagggttcgctgaccctgatgcacatgttcgaaagcacgcagttcgtgcccatcggcaatacgccggtgatgctgcaagccatcgccatggatggcaccccaacaggcgcgccgatccatcaaaccatcggtcccggcggcattcttgaaatcaagggctgcactcgcggccaacgctaccaaatcaccttctatcccaacgtctccaaggaacacgtcaaggcgctgtatgcgtcttatcagtcggtgatcgccgggctggaagctcacctgcgtgatcagtgggaaaagaccttcaaggcgcaatggagtgacttttcaaaggctaaacctctcgaacgcagcttcatgcagggtgttgcgttttcaaccgggatttttcaggcgttttacaacctttgggacaacgttacgcaactgtttgacctgctgaaaaacgtcaagtcgaacagcgagaagtggctgcaatacatctcccaaagtgaactcgatgagctgctgaaactgggacgtgacgcccttgcgcaaggcctgcttgtcctcagcgatgaaccgctgctgttcatttatctgtccgcaatggtcagttggatacggatgctgccgccgccagagatgtatgaattgctgggggaaatcaccggagaggtcctgatcaatctgtttttgatctgggcgacgcgaggtatgggcgttcggattcgcctgggcgtacaggtggtggggcatatcaagtccgggcgagcacgcaagtggctggagatgctggccgaacatcttgtggggcccaagctggaggcgcatgccgaggcggcaaagcctttgctgctcggcagtacagcgataccaaccaaggtgatccccgctgcgcctttgaaggctggggatcaggtggtttcgaacgctgtgccagcggttcgggacaagcgagttcagcgcacggcgctcgttcggcaagagcctgtcgatgatgcgcctgcgtccggcaaaaaccctgcaggcgacgcagcggctccggccgataaaaccgtgaccaacggttgcccggtgtcgatggttaccggggaggaattgctgaccctgaccgacggcacgctggacgggattttgccgttcgagtggacgcggttgtatcgcaccagtgccgtggaagtggattgcgggttggggtttggctggagccattcgctggcgcagcggctggtggtggccggtgattcggtggtgtggacggatcacgaaaatcggtcgacggcgtttccgttgccgacggcttcgcggcctgcgatcaccaacagcctggctgaagcggcgatctatctgggaacactccccgatgaactggtgctggcgcaggactcgcggttttaccactttcgcgacggtgtgctgacggcgatcagtgatgcgtatgacaactgcctgcaggtttttcgggatcggttgggacgggttgagcggctggacaatggcgtggggcgctcgctgtttctgcgctatgagcgtggccatattgtcgccgtggagtaccagattgaacgggccgaggggccgggtgagtttgtctgggtcactgagcagatcgttgtttcctacgcctatgacgtagcgggtcagttagtttcggcgaccaatgcggtaggtgaaagcgaggtttatcgatacgacgaacagcacgtcattcttgagcgtcagttggccggtggggcgagtttcttctgggcgtgggaacggtccggcaaggcggcgcggtgtgtccggcactgggccagcttttcgcagatggacacgcgatatgcctggggtgatgacggccaggtcacggttaaaaacgccgatggcagccaggaagtctacgtgcatgacagccgtgcgcggctggtgcagcgcattgatccggatggcgccgagcacttcaagtcctacgacgaaaagggccggttgacggttgagcaggatccgctgggcgcggtgacggcgtatcagtacgacgacgccgggcgtttggtggcgttgtttcccggcgaggatgaaccgacttcctacgagcatgacaacggtttcgtacgggttgtgcggcgtggtggggccgtctggaagtatgagcgcaatgatcagggcgatgtcacccgcaagacagatccctccggtaacgtcacggactacagctacaacaaatacgggcaactgaccggggtttggtatcccgaccacagttgtcatcggttggtgtggaatgagcgtgggcagctggttgaggagcaactgcccaatggcgggattaagaggtatcgctatgacgacctggggcggcaggttgcgcgtgaggatgaatttggcgcgctgacgcagtatcaactggacagtgttggccggctgattcgcattgtgttgccggacggcggcacacgggaatacagctacaacccctacggaaaaatcaccgctgaacgtgatgagttggggcacgttactcggtacgaatacggcgacgggttacatctgatcagccgccgaatcaatgccgacggcagccaggtcacgtatcgctacgacaacacgcggttgctgctgaccgaaatcgaaaacgaggtcggcgaagtttatgcgctgcaatatcaccccaacggcctgatccagcaggaaaccggctttgacggccagcgcaccgcctacgtctacgacctcaacggcaacctgcaggaaaagaccgaacacggcgacgacggcagtcagctgattacccgctacacgcgagaccacgccgggcgcctcgtacgaaaaaccctccccgacggcaaatccgtcgactacacctacgaccgccagggcaacctcctcggcgtcaacgacggccactgggcgctggcctacgagtacgaccagcaaaaccgcctcaccgccgaacaccaaggctggggcaccttgcgctacggctacgacgcctgcggccaactgaaacgcctgcgcctgccggacaacaaccggctcaccttcaaccatggaaaaggcggcgacctaagtaccgtcgaactgaatggtgaaaccctcacctcccatctgttcaaggccggccgcgagcgacagcgccagcaaggccaactcatcagccattacggctacgacgaacaaaaccgtctgcatgcccatgccgtcacccagcaaaggcaggatctttatcagcgccactacgactacgacaaaaccggcaacctcagccgaattttcgacacccgcaagggcgagcaccactaccgctatgaccctctcgcccgcctgacccgcgtcgatcactcacaagacgaacaggaacgcttcggccacgacccggcgggcaacttgctgatgcaggaccgcccagggccggacatcgtggcgggtaaccggttggcgatacagggggatcatcattatgactatgacgcgttcggcaatctgatccgtgaacggcgcgggcgtgaacatcggttaatcactgaataccgctacgactgccaacaccggctgatcggcatcacccgaccggacggccaaaccgccagctatcgctacgacccgttcggccgacgcatcagcaaaaccgtcgacggcaaaaccaccgagtttttctggcaaggcgacaaactcatcgccgaacaccacgccgatcgccatcgcagctatatctacgaacccgacagcttccgcccgctggccctgctcgaaggcttcggtccaaaagccacccagcctttctattaccagctagaccacctaggcaccccacaggaactcaccgcccccagcggcgagatcgtgtggtccgcgcactacaaggcctacggcaaaatcagccggctggacgtaggcaaaatcgacaacccgctgcgcttccagggccaatacttcgatgcggaaagcggcctgcactacaaccgccatcgctactacaatccggatctgggccgttacctgacgcccgacccggtgaagctggcgggtgggattaacgcctaccaatatgtgcccaatcctacggggtgggtggatccgctgggtctaagcacctgcccaggtgatgatggctgcaagccgcagtcaaaagtcataagccctaccgatcaggcaagggttaatgaacgttcaccgtcagctccgacggctcagaaaaaacgaagctatctataccgtggggactcaagagagccagatgaaatattcaaaaccggatttgaaagtagaggcacaagcacggatcttttactgcactctctaaacaacgctagccctcccagtcactttgtccctacgtcgtcttcaagtagacaggcgttggtattcgcttcaagctttgggttcgaagaaggctttctttacacgctcaaaaaaattccagggcgggacgtgaatgctgaactgggagcgcgctctaaacacaaaaacgaagcagagatagcaattcccggacgtatagacacgaaagacattttaggcgcctccccggtaaacgaagacggcacttacaagggatacacaatcttgaaccctaatagggagtacccatgaaatctcgtgaaatcaccattatcaaaaacggtttacgtgagaacgcattgatcgagtacgaagggggtaagcccacccttaatctggtattgcgtgatggcgcccgaaaatcctacaccgcaatggatctttacgaaagtttcggcttattaaggtccgatttgaaagacataaaatttttatgcaaaggcgccaggatcaatgttcacacctcaggaatgtcttcgcacatgtctaacggtctcgttgcttacgagatgactatgggcattccggagggtgagcttgtgcatattttctcttacgacgaaagcaatctcaccaacgatattcaggagcaacacgacttctgccaacgctgggcggaatcggtgtagatggggtgcgaagctcccgcgacgagacgagctagctcactcgccacaggattaataggcggaatcaaatccccgccaccgccaaatccatcgcaaaatacgtaaatatcaaatccgcccccgcgcgcttgatcgaccccaacgtctcacgcaccacccgcgcttcatcaatcgcgcccgcctgggcgccaaacttgatcatcgcgtactcaccactgacctgataggccgccaccggcaagcgcgaagcctcacggatatcgcggatgatgtcgaggtaagcgccggccggcttgaccatcagagcatcggcgccttcctgctcatcgagcagagattcgcgcacggcttcacggcggttcatcgggttcatctggtagcttttgcggtcgcccttgagggcgctgccaccggcctctcggaacgggccgtagagggccgaggcgaatttggtggagtaggccatgatcgggatgtgggtaaaacccgcgtcatccagggcgcggcggatggcctggacctggccatccatggcggcggacggtgcaatgacgtcggcaccggcgcgggcggcggcaacggcttgtttgccgaggttgaccagcgtggcgtcattgtcgacgtgggcaccgtgcatcacaccgcagtggccgtggtcggtgtattcgcagaagcaggtgtcggacatcacgatcatttccggcacggcgtccttgatgatcgaggacatgcgcgagaccaggccgcgttctttccaggtatcgctgccgctggcgtccaggtggtgggacacaccgaaggtcatcaccgacttgataccggcacgggcatagcgctcaatctcggcagccagtttcttttcaggaatacgctgcacacccggcatgctggtgatcggcacgaagtcgtcaatttcttcctcgacaaaaatcggcagtaccaggtcgttgagggtgaattcggtttcctggaaaagaccccgcagctccggggaacggcgcaggcggcgtgggcgggcttgggggaactggctggtcatggcggtcctgaaaagtggaaaaaataatggggcgaaagcttatgcccaccggcacaggcagcacaaatgccaagggaccaacagtgtattgcgcgactcgcaacaattcattgatctagagctgcacttgcccttcgatgcagacggctaccgcaccgccgatccagatttcatcgccttcgcgatcgacgtgaatgcgccccgctcgcccgatggctgtgccctggctgacccggtaatgctcaggcgccaaaccctcggccaataaccattgggcgacaccggcattcaggctgccggtggccgggtcctcctgggcgccatcaccggcgataaaagcacggacctcaaagtgcgcgtccacatcatcacgcgcagggtcacaaggcgcgatcactcccagggccaaaccgtgcagttgcgaatagtcgggccgcaggccgagtaccgattcacgatcagcgagcatcagcgccagccaccccgcaccgttatcgacccactggctacgcacaatggcttgcggcgccaggcccaacgccaagcgcacacgttgcagcacaggctcctctaccgggccggagcgcagtaaaggcggtgcaataaacgccagttgctcgccttgacgacgaatacgcaccaagccgatttcgcactcctgaatgatctcctcgcctttgggcacgccccccgcttgcaaccaggcctggcaactgcccaatgtcggatgcccggcaaacggcagctctttgagcgtggtgaaaattcgtacgcggtagtcggcgcgtggatcgcgcggcgtcagcaaaaacgtggtttcactgaggttggtccagttggcgaagtcggccatttgctggtcgctcaggctgtctgcacccagcacgaccgccagcgggttgcccttgagcgcgacgctgctgaaaacatccagttgcttgaaatcgaacgtcggcatgcgttaacccggaatgctcaagccacggatcacggccgggcgtgcgacaaagctgtccagcacgcgcagcacgttggggaaatcggcaatgcccaccaggtcgccagactcatagaaaccaatcaggttgcgaatccacgggaaggtggcaatgtcggcgatgctgtaatcgtcgcccatgatccaggtgcggcccaacaggcgtttttccaacacttccaataaccgccgggattcggccacatagcggtcacgcggacgtttatcttcataggccttgccggcgaatttgttgaagaatcccacttgaccgaacatcgggccaataccggccatttgaaacatcagccattgaatggtttcgtagcgggtggccgggtcttcgggcaacaactggctggttttttccgcgaggtaaatcaggatcgccccggactcgaacaatgccaacggctgcccactcgggccattcgggtcgatgatcgcggggatcttgttgttggggttcagtgacatgaactccggagataactggtcctgagtctcgaaactgaccttgtgcgcctcatagggcaggcctaactcctcaagcatgatcgacactttgacaccgttcggagtgggcaacgaatacagctgcaaacgctccggatgctgggcgggccatttgctgttgatcgggaatgcggcgagtgcgttcatcgaaaagtcccttgggcgcaaagccccatgtgagtcaggaagcccccatcatagccacctgcccggcgtcctgcatgggtcatcaatacgcaacatggccacgctaatctgccgcgcaggcgaaccaaagtatcgatgtggactcttaagtgcgccattacggtgaaaggagacacctcgttacaacgacatggaaaaccgcagggtgccgcaagcgccactggggccgggcctgtcagccctcattcgaagcacgaagactcgaacctacaatgacgatcaagcctctgtgccttgcgcaacgactcaaacgctattcatacatcatgttgccagtgctactggccggcggcgcaattggcctgaccctggaagcgcgtatcagcagcgccggcccggtggacggcgtgcaaaccctggtattcctgcgccacggtgaaaaacccgccggcggcctcggccagctcaactgccagggcctgaaccgtgcgatgaacctggccaccgtgttgccggaaaaattcggcaaggccgattacgtgtttgccgcgaacccgacacgcaacgtcgaggaaggcgagcacgacaattcctacagctacattcgcccactgatgaccatcagccccagcgcgatcaagcttggcctgccggtgaatatcaagttctccgccaacgataccagcgcactcgccgacgaactggtcgaagacaaataccacaacgcgaccatctacaccgcgtggtcccatggttacctgccggaactgatcaacaaggtggccagtgaggcatcaggcgagaagcacaccctcaccgacgactggtccggcagcgactatgacacgctgtatgtgctgacgttgacctggcacaacggcaaagcctcgctgctgagccgcaactacaaacagggcctgaacaacggccagcagacctgccccggcgcgacccaagtcagttcagatatctaaacaaaacaaggccggctgtgctctaaagagcgcaaccggccttttgctgttccccgcccgttactgcctggcagccagcaaacgctggtggcgattgcgtcgtgcgatgttcaggcactcaatcgctgccgagaacgccatcgccgcatacacatagccttttggcacatgggcgccgaagccttcggcgatcagcgtcatgccgatcatgatcaggaagcccagggccaacatcactactgtcgggttgtcgttgatgaacttggccaacggttcagccgcgaccagcattacgatcaccgagaccactacggcaatgatcatgatcggcaagtgctcggtcatgcctaccgcagtaatgatgctgtcgatggaaaacaccaggtcgagcaacagaatctgaccaatagccgcagcaaaaccgatggtgacggtattgctgacactcgccttctcttccggctccgggtccatgctgtgatgaatttcagtggtcgctttccacaccaggaacaggccaccggcgatcaggatcatgtctttccacgaaaacgcctggccaaagatttcgaataccggcgccgtcaactgcacgataaacgcgatggtgctcaacagacccaggcgcaggaccaacgccatgctgatcccgatgcgccgcgccttggcccggtgcttttcaggcaacttgttggtgaggatcgaaataaagatcaggttatcgatacccagcacgatttccatgacgatcaaggtggccagggcaatccacgcggtggggctggcggccagttgtaaaaggtagtccataggtcagtcctgacgtggtgatgcttgggaattaggtttctttggtgtcggtttcagaggcgttttcggcctcttcttgctgcttctcagggcttatcaagccctgggtcgcctcacccaatgcctgttcggcggccttgtgggtttcatcgatggcctgcttggccgactcggtggctttgcccaacacctgctgcgcgcttttctcgacctgatcgcaaccgctgatcatcagcaatgaaagcgcaagaaacgacgcagcgcccagggaattgagtttcatgatgtattcctcgttagaaccattgggtccaagtagtggcccctcgatagcgaggcattctatgcaggcgaacagttcagtaaaattcgtatttttctcgcgtatacttcgatttttacgaagtgtaagcacccatgctcaattatcgtcaactgcattacttctgggtggtagccaggacgggcagcatcgtgcgcgcctgtgagcaactgaaccttactccccagaccatcagcgggcagatcagcttgctcgagcaaacctttggtgtggctctgtttcagcgtgtggggcggcagttagagttgaccgaggccgggcgccaggcgctgccctacgccgagcagatgttccagaccggcaatgaactggaggccatgctgcgggcccagcccaacgagcaacagattcttttccgggttggggtggcggatgtggtacccaaatccatcgtctaccggctaattgcgccaaccatggaattgagcgagccgatccgcatcacctgccgcgaagacaagcttgagcggttgctggcggatctggcgatccagcgcctggacctggtgatttccgacagcccgatgcctacgcacctggacatcaagggctacagccagaaactgggtgaatgcggcatcagtttcttcgccacccaggcgttggctgaccggtacagtggcgatttcccacactgtttgcagggcgcccccttattgattccgggcgcggaaactgtagtgcgcagtcgcttgcagcgctggttcgccgaacagcagatccagccaaagatcatcggtgagttcgacgacagcgccttgatgcaggcatttggccaatcaggcagcgggattttcatcgcccccagcgtgatcgccgatgaggtggtgcgccagtacggcgtggcgctgattggccagaccgatgcggtcaccgagtcgttctacgcgatctcggtggagcgcaaggtcaagcaccccggcatcgtggcgattaccgaaggggctcggcgggagctgtttaccgccctgccttgacaattcaggcgctgggcgcgaccggctgcttggcggtcatcagccacagcgccagcaggatcgacacgaggatgaagccggacgctgcaaaccccaggctgcccagaccgagcgtgtcgatcacatgcccgccgaccatcgcccccaggccaatccccaggttacccccggcaatgttcagcgacgccgcaaatgccggcgcgtgaggtgccgccttcatcagccgcacatggctgaccaggaacatcgccgcctgggtcacgccccatactgccatcgccgccgcgaggccgagggtggagtgaatcgccggtaccagtgccaccatgcccgcgatcatgaaaccgcaaaacaccatggacgcaatcaaggggtggcgatccaccgctcgcccgcccagggcgttgccgatcaggccgaccgcgccaaagcccatcaggcaccagcccaccagcgtgccgtcgaaaccggccaggcgttcaaggatgtccgccaggtaggtgtaggcggtgaacatgccgctgaacaccaggatcgacagcaagatatggccctgcatcagcgggctgcgcaaaatcttgaactgggaacgtagcgtcacttcatcgtttttcggtttcgtcaccggcaagtagaccaacagcagcaaggccttagccaacgcaaccacagcaaggagggcgaacgcgatgcgccagccgaacatatcggaaatcaacgtacccaccggaataccgaataccgtggcgcagacgatgccaaacccgatcttctcgatggctcgcccggcgtattccgggccgacgatatccaccgccgtttcactcgccagggcccaaaatactggcaagcccagcgcgggaatcaggcgcgccacggccatcacccagatgttcggcgccagcgccgcgagcgtattggcggccgcaaacatcagcaggatcgtaataaacagacgcttgcgctgaaagcgcgcgaaataagccgtcaaaaacgggccgaaggccgccacggtaaaggcgaacaaggttaccagcaacccggcctgggacacgctgacattcaggtcccgggcaatggacggcagcaggccgacaatgatgaattcggtggtcagcacggtaaagccggcggccgacagcagcaggatgggaaacagcacgaaaactccgaaaacgacgacatcaacgattgcccgaagggcccgctgacgaatagataagatgagaggcaagaatcttaacagagtatgtctggctttggccaaagcctgcgggcgcgggtgacgcaatgccgcactgaacgggacacttcccgcagcatgctagactttgcgcctgcttcctacagcgctttctgcccgcaatgttgcgcttcactataaaaccagagacacctgtttatgacccctgccccctccctccttcagcgcctgatgcgcgtcagcctggtcacgcaaattgtcgtcggcctgatcgctggtattctgctggccctgctgctgcccgacgcggccagagccaccgggtttatcggcaaagtgtttgtcgccgcactcaaaggcgtggcgccgatcctggtgttcgtgctggtcatggcgtcgatcgccaaccacaaaaccggccagcaaacccatatcaaaccgatcctgtttctctacctgctgggtactttcgcggccgcggtggtcgcggtaatcgccagcacgctgttcccctcgacgctggtgctcgccacccatgatgcgaccatcagcgctcctggcggaattggcgaagtcctgcaaagcctgctgctcagcgtggtcgacaaccccgtcaacgcactggtgaatgccaacttcatcggcatcctggcctgggccatcggtatgggtgttgccattcggcacgccggcgaaaccacgcgcacggtactggacgacctgtccaacggcgtgacgctgatcgtgcgtgtagtcatccgctttgcgcccctgggcatctttggcctggtggcttcgaccctggccacctccggcttcggcgccttgctcggctacgcccacctgctgctggtgctgctcggctccatgctgtttgtggcgctggtgatgaacccggccatcgtgttctggaagctgcgccgcaacccctacccgctggtattgatgtgcctgcgagaaagcggcatcaccgcgtttttcacccgaagttcggctgcaaacatcccggtgaacctggcgttgagcaaacgtcttgggctgcatgaagacacctattcggtgtcgatcccactgggcgccactatcaacatggccggcgctgccatcaccatcaccgtgttgaccctggcagccgtgcatacgctgggcatcaccgtggacctgcccaccgccgtgctgctcagcgtggtcgcggccatctgtgcgtgcggtgcgtcgggtgtggccggagggtcgctgctgctgattccgctggcgtgcagcctgttcgggattcccagcgaaattgccatgcaggtggtggccgttggcttcatcatcggtgtgttgcaagactcggcggaaacggcgctgaattcgtcgaccgacgtgctgtttactgcggcagcttgtctgggcaaagacgcgcagactgcatgaacagtaaaaagcccgacgctgaggcgtcgggctttccaaacatgagcgtatatcgcctcaagcagcgttgctgttgacctcaaacgcctcaagcggtgtgccatagcgcttatgggtcttcaggtcataccggtaccagtattgggtgagcggatcttgttgagccaggacttgcgccccaccggtaccaccgtcggtgccaattacaacgtctttcggcttgctctgataaacccgatcaacactgcggttggtcgagataaccttccaggaaaacgtccccttgcccagtgctgaccagtgcagtggcaactctcgggtcacgatggccttgccacccgcaaacgggttggcggcactgagcaaacctcgcgccagccggcccgccttgcctccaaccgaaccgccgactttcaccgctttggagattctactgacggctcccgcaccgcccactacaaacccgaaaatatcgaacgccaggaaagtaagcccctcaccaaccttgccctgctgaaagctgtggatcgcggacgcaaaaggtatcaatgcgcgggtcaccgcctgaatctgctcgaacaccgttacttcagtgtcaaaggtggtgacgcctctggccgcgttgatcagtgcttcgcgttcgttgggtgtgaacatttgattggcgacggtctgcgcaatgaagtgcgttctgggggaattgaacgcttgtacgggaaagggcaaatcaggcctcgcggcacgctgggcgacctcttcggcgccacccgccttgatttcagtgaccctggtgttggagcgaacgctaactttcggatttctcgaccctgaagattgccattcgcctaaacccgccctcaccccatcagccagatctgttcgctcatgcagggtgccacgttgagtgtttaattcgtaaattcttcgcttgccctggtacatcgactcaaccaataccgctttattgtcgacattatcgttgtgcgaggcggtcgaaatttttgaagaccccgagtattgggttgtacgtgtgaaacgttcctgggtatagaacttcaattcacccttttccatcgcctccttatcgtccacaggcagcgtcgacatcatgtgtttgatggaaacctccaacgcgcccttgaacccgtcagcaaactcagtgacggttttttcaaacatctcgtttactggtggcaatgaacgaagtgcgtgagataacgacttaacgtcaatgccgggatcgctggattcccataccgtgtgcagttgcgggctcagatagatgtccagtatcgagtacgggcctttcaagtcccgatccgctacggtgggcacaaggaattttctctcgaagtcaatgttgccaagcgttttggtcaagtgctctttcaacaggctgagcgccaacgccttgcggttgggaaccgttgcacgctgcgctcgcgaagcagcctccaaggtatcgaaacgctcactggcgagctccccggcgcgctcaatctcttcagcggtgtagttgttatcagctcgcttcgcaatggcaccatccgccacggcccaatgaatcaaaccctcccgcccggccagggcttccacttccttttctgcggcggtaatgggttttaggtcctcgttcaacagttgctcgtaggtcttggttacggccagcccaggagtgcgcatctcggctttggcgacgatggatttgaggctgacccaagcggatgagccataggtcacatgctccggcaagtctttgaccagcagctccggcgcgtgatgcgacagcaacaggtaggcggcaactggtgcgttgtggccataggatttgctcaggtgtcgggtcaacccttcaacaacgcgggacagtggcttgccccagtgctgtcgcgccgacaaatcaaacccggccaccttgttcttttcgtcgggttttaaccatgcgtcacggttaagacctgcctgcagcgccgtcagcacccaatcttcaacacttccctccccttcaaactcgttgcgcagggcttcacccaaggcttttgcggccgggctgcccagcaggctcatgacggcctgccgtggatttttcagctcctcgccagtccatttcacggtttgagccaggtaaccaaaggcattctggctcaacttgagcgtgtcgagctcgggcacttgcaaggcgttataagagacggcgtcgtagatatcctgttgtatttgcgcatccagaggcacaggccacgacaacccgccaccgagatcaccctgtggttgccggggttccacagcacggaacaattctttgctcatgttatcgagttcatcttcgttggccgggtgctcccaaccgttgccggtcatgaactgcaacaagttaatcgacttgccggccatcgcctggttatccagatgaaagctggagtccggatccagcctgatctgttgcgatcgcagataggcctgaaaaccagcctgcgtatcgtatgccggggggttgggtgcatttcggtagtggtagtcgtgcaacctcgactgttgctgcagataatcgccaaccctcaccgaggcgctggtcaatgcatccctgaacgtgagcaagtcgcgttgattgccaatcagggctttttgagccgggataaccgccgcgtcgggctcctcgctcggcacttcgcgtcggggccgagccagctttgccgtattgggtagatcgagcagcgagccggaataagggtttgcgttgatcacgggaagagaagagatactcaaacagttagcctccagggctctgacaacaggactgatctgatcctcttattgagttatctaccgcacttggttgcatcggttcgtgttacagaatgagaaagcgggcacaaaaaagcccgggggttcattcaagaaccgccccgggctggcagagcagacgtgagttagaacgcgcccatgtaatcacgcttgcccacttccacaccgttgtgacgcagcagcgcgtaagcggtggtgacgtggaagaagaactgcggcaggccgtaggtgagcaggtaagactggccgctgaagcgcttctctttcggggtgcctgggcgggtgatgatttcgatgccttctttgccgtcgacttgctcaggcttgatggtatcgacgaaagccagcaccttggcgatcagcgcttgcaggtcggcgaaggtgacttctttatcttcatatttcggcacttcgatctccgccaggcgcgcggaaacacctttggcgaagtcgaccgcgatctgtacctggcgcaccagctggaacatgtccgggaacaggcgcgcttgcagcaaggcgtttggttcaatgttcttggcggtggcgtgggcttcggctttgttcagcacatcgctcagggcggtgagcatttgcttgaagaccgggatggaagcggcgtacagggaaatagtcatgacagtctcacggtaatggcagggttggaaccagcggcgattatagacctgccagtcgcttgtcttttattttttcaggattaggctaggcacttcactgcatagggaaagcgcgatgaccgccgagcacgacaccgacacccctgagccgcgcctgaacagcacggaaatccgcatcctgggctgcctgatcgaaaaacaggcaaccaacccggaaacctaccccctgaccctcaacgcgctggtgctggcgtgtaaccagaaaaccagccgcgaaccggtgaccaacctcagccagggccaggttggccaaagcctgcgcgcgctggaaggccaaggctttacccggttggtgatgggcagccgggccgaccgttgggaacatcgtgtggacaaggcgcttgagctggtgccggcgcaggtgatcctgatcgggctgctgtttctgcgcgggccgcagaccgtcaatgaattgctgacccgcagcgggcgcatgcatgactttgaggatgccgagcaggtggtgcaccagctggagcgtttgattgcacgggggctggcgctgttggtgccgcgtcaggccgggcagcgggaagatcggtatacccatgcgctgggtgatccggcggatatcgaggcgatcctatcggcgcggggcagtccggtggagcgtggggccgtggtttccgcagaccggattgaagagctggaagcccggattgctgcgctggaagagcgattggctcagctggaacaggcgtaatacggtcaaacctgtgggagctggcttgcctgcgatggcggtgtaacagatcaactatcggtgactgacacaccgccatcgcgggcaagcccgctcccacattcggaaccgtacagtgatttagctacgtgcgaactcgactgctttctgaaactgctcatccgtcggccttacgccggtgtacagcacaaactgctccaacgcctgaatcgcgatcacttccagcccggtaatcacccgcttgcccttggcacggccacgcacgatcaacggtgtttcggcgggaatcgccaccacatcgaagacagtatccgctgcatcgaccgcctcggcgtcgaaggccaactgatccgcctcagccccaccggccatgccgatcggcgtcacgttgaccagcatctgcgggcgcaaatcacccagttccgcctgccattcatagcccaggctctgcgccagcgcgcgccctgccgcttcattgcgggccacgatcacgccgttggcataaccgccgtcccgcaaggcgctggccacggctttgcccatgccgccgctgccgcgcagggcgaaggtggagtccttgggtactgcgtgctttttcagcagttgttcgacggcgatgtagtccgtgttgtaggccttgagatggccgttggtattaacgatggtgttcagcgaggcgatggccttgaccgagctgtccagctcgtccaccaacgccaggctggcttccttgaacggcatggaaaccccgcagccgcgaatacccaacgcccggataccgccgatcgcaccgggcaaatcctggctgctgaacgccttatagtagaagttcagacccaactgttcgtacaggtggttatgaaaccgtaagccaaaattaccggggcgcgccgacagtgacatgcacagttgagtgtccttgttggggtgcatctgcatggaaaactcctttgagtaagcaattcggtacagaccttacacaacctttacctatcggctgtgctgtttttcagaaatacgttgtcttaaaagtatccccgcgacaatccttgagtctattgattgcagaccacaagcgcaggggctaaccgaggaatgaccatgattcgtaaaatccccaaaatcgccttgcttatcggcgcactcgctatggcaggccaagcctccgcccacggtggtggttggggtggcccggccatattgggtggtttgatcggcgcagccgttgtcggctccgtagtcgccagccagtcccagccggtctacgtgcagcaaccggtgtatgtccagccgcaaccggtctatgccgcgcctccgccggtttactacgcgccgccaccgccggtgtatgtgcagcaacaggtttattaccgtccggcgccggtctattacggcccaccgcgcggttactacggccctccccacggctactacggccgcggctggtaacacgcagtcggtatgacagaacaggcctcgcccacacgcggggcttttttttgtccgcaaagtccggattcaagcagccgaggtcgttatgaggacaatgtgtgggcgttaatcccacatcatgacagtccaatgtctacttgcccgacagaggctcacgctgtcatgtttacgtcacgaaacagactcactattgacccttgtccacccaaaaacaattaaggacgactgaccatgcccacacaaaacccgcaccgcaccgccggcttgtgcacgtccagcaaggtctacagcgccctgaccgaactcaagcacctggagggccaccgcagcgcgaaatttttggcgttgctggccgagaacctggtgcgcaagggactgctcagtgaacaggaagtggtgaacatgctcgaccaggtcgtggattgacgcgtggcgttgatgtcgactatcgagacaggtgatttttcctgaggggtgcccgcccgtagagtgacctccatagcgattggaggtacttatgcacactgttcagatcatgtccgtcattggcagcgccgtccccgcccctcttcgggagatcgggctgttggcctgctggtatctggtacgcgatggcgagcccgtcagcggcccgctcacgtctttgacagcagcagaaaagcagcttcaagcctgcagctttaagcttaaagcctgaattcgccgccctagggtaatggcagtttggtccgcggcttgctttcgacaaacaatgcccagctcgacatgaacaacgccgccaccagcggcccgatcacgaatccattcaggccgaacaccgacaagccgcccaacgtcgaaatcaggatcaggtagtccggcatcttggtgtccttgcccaccagaatagggcgcagcacgttgtccaccaggccgatcacaaatacgccgaacaagcccagcaccacgccctgccagatcgaaccgcttaacaggaagtaagcggcgaccggcccccacacgatgcccgcgcccactgccggcagcagcgacagaaacgccatcagcaccgcccagagcaacgcactgggaatgtccagaaaccagaaaatcaaaccgcccaatgccccttgtgtcacggccaccagtacgttgcccttgaccgtggcgcgcaccacgcggttgaacttgagctgcaaacggcgcttttgcggctcggccaacggcaccgccgtgcgcaccttgcgtaccagctcggggccgtcgcgcagcaggaaaaacagcagatacagcatgatgaaaaaactcaccagaaaatcaaaggtgccctggccgaagctgaacgcctgagtggcgaagaactggctgccctgcatcgcgcttttgacgattttctcgcgcaggccctcaaggttgcccatgccaaaacggtcgagcaggtgttggaaatacggcggcaagaagttcttgaactgctctatataccccgccacgtccaatttgccgctttcgacgtttttgtacagcgtggcgccctcttgcaccagcaacacgctggtgatgatcaccggcagaatcgcgatgaccaggcacacggtgagggtcgccagagacgtgaagttacggttccaggcgaaccgctgctgcaggcgcctttgcatcggggcaaagataatgccgaggatgaccgcccagaacaccgcgccgtaaaacggcagcaatatccagataaaagcgatggtcaccagggcgagcagcaacagcagggttttgaattgcaggttggtttggttcatgtccggtccatgtcagaaaagcaggggccttcgtaggccctgttgcttagtccgctgcgaaacctgggagtgccctgggttatcgaacaaggggctatcgaacaagcatagaccgcctcaatcaaaggcccgcggcctgtgccttggcttcgcccagcagtgtttgaatgacctgttcctgcacgtcataacggccttcgccaaaatgggtgtaacgcacctggcccttcgcatcgatcaggtaatgggcaggccagaactggttatcgaaactgcgccagatcgcatagttgctgtcgatcgccaccgggtaggtgatgcccagcttgcgtacctgctcctgaacattgcgagtgatgtgctcataagcgaattccggggtatgcacgccgatgaccaccagcccctccttttcgtagcgtttcgcccagcctttgacaaaaggcagcgcgcgctggcagttcacgcagtcataggtccagaaatccaccagcaccaccttgcctttgaggtcctgcacacgcagtggcggtgaattgagccaccctgttgcgcccgccagtgacggcatggcgccgcgactatcgagtgccgcattggcagctgtttcacggctaaacgcttggctgcagatcagcgcgaacgtcaggagcaggccggcgaacagaatcgtgagaggtcgcatgtcgattaccttgtgggttacgcagagccactattgaaaccccttgaggtatcgcgcctgtgtcgaacgcccgctggcgatacacagcgatacaaaatcggcaaaaggcgatctggatcaataaaacccgccgcccaccccgctaccctcgcgaccttttgcgacctgagcctatgccctcccccctcctcgcccccgaactgctcgcccctgccggcaccctgaaaaacatgcgctatgccttcgcctacggcgccgatgcggtctacgccggccaaccgcgttacagcctgcgggtgcgcaataacgagtttgaccacgccaaccttgcgctcggcatcaatgaggctcacgccatgggcaaacgcttctacgtggtggtcaacatcgcgccgcacaatgccaagctgaaaacctttctcaaggatctggcgcccgtgatcgccatgggcccggacgcgctgatcatgtcagacccgggcctgatcatgctggtacgccgccacttcccacagatgccgattcacctgtcggtacaagccaatacggtgaactgggcgagcgtggagttctggcagcagcaaggaattggccgggtgattgtgtcgcgggagttatccctggaagagatcggcgaaatccgcgagcaagtgccgaccatggaactggaggtgtttgtgcacggcgctttgtgcatggcctattcggggcgctgcctgctttcgggttacctgaacaaacgcgatgccaaccaaggcacgtgcaccaacgcatgccgctggaaataccaggccacacccgctgtggaaaacattaccggcgatatcgtccagcaatttcagccgacgcttggcaggggtgcgcctaccgaccaagtgttcctgctgcaggaagccaaccgcccggacgagcacatgcccgccttcgaagacgagcacggcacctacatcatgaacgccaaagacctgcgcgctgtgcagcatgtagagcgcctgacccacatgggcatccattcgctgaagatcgaaggccgcaccaaatcccacttctattgcgcgcgaaccacccaggtgtatcgccaggccatcgatgacgcggtggccggccgcccgttcgaccgcaacctgatgaccgacctcgaatccctggcccaacgcggctacaccgaaggcttcctgcgccgccacgtgcacgacgagtaccagaactatcagaacggcagttcggtgtccgagcgccagcagtttgtcggggagttgaccggcgagcgccggggcgagctggccgaggtcaaggtgaagaaccgctttgccgtgggcaatcatctggagttgatgacacccggcggcaactttcactttgacttgacccgcctgctaaacgccaaagaccaggccattgaggtggcaccgggcgacgggcacacggtgtatgtgccgctcccggtcacgatggacctgcgcttcggcttgctgatgcgcgacctctaacgcgtcgccgcgcagaattgccggatcgcttcgcacgcctgcaacaacgaatcgtcatccagggcgtaggcaatgcgcaggtacggcgccaacccgaacgcgctgccatgcaccacggccacgttggcttcatcgagcaaggcgagtgccacgtcttcgtcggtttgcagcagcttgcccgccggcgtggtacgccccagcaagccggcgcaggaagcaaaggcgtagaacgcaccagacggattcatgcattccagccccggcgtggcgttgaggaacgacacaactaagtcacggcgcttttcaaacaccgcccgcgacgcgtgcacaaaatcctgcggcccggtgagcgcggccatggccgcttgctgggaaatcgcgctggcccccgaggtctgttggccctggagtttttccatggcctccagcaaccagcgcggcccggtggcgaaaccaatgcgccagccggtcatggcgtaggccttggacacgccgttcatggtcagcacgcgcggcatcaggcgtggctcgacttgcgccagggtatgaaaggtttggccgtcgaacagcaagtgttcgtagatgtcgtcggccagcaccagcacatggggatggtcgagcagaacgtccgccaacgcgcgcagttcctgctggctgtacacggcgcccgtggggttggacggcgaattgaggatgacccagcgggtattcgggttgatcgccctggcgagcgccgccggcgtcagcttgaaaccgtcctcggcgctgcaggccacgatgttcgaggtgccgccgcacagctcgaccatttccgggtagctgacccagtacggcgcgggcacgatgacttcatcgccttcgttcaaggtggcggccagcgcgttgtagatcacatgcttgccgccgttgctgacgatagtgtcctgccaggtcacgtcgaggccgttctcccggcggaacttctccgccaccgcttcacgcaaggcccgcacaccagccacctgggtataacgcgtgtggccgttgcggatcgcatcgataccggcctggcggatgtgctccggggtgtcgaaatccggctcgccggcacacagcgagatgatttttgcaccttgggcacggcgttcggccacgcggtcgatgatgcggtaggtggccgaaggctgagcctgggccaggcgtttgttgaggcgttgaaggttcacgagcctttcctttgcagcgtgtggtaacccagggattcgcgagcctgcttcaaggtcttgcccgcctcgagctgagcgcggatctgcgattccacgtcttcgatctgccgcgcgacccgcgccacttccgcagcacgggcgcggggcaccaccagcacgccgttggcatcggccaccacgatgtcacgcgagcacacacgaacctcgcttatcgccaccggctggttcaccgccagcacttccacacggtccttgccggtgcgcatgtagcggccacgggtgaacatcgggtagccatcgcccagggccttgctgacgtcacggcacacaccatcgatcacggtggcggcgatgccacgcgcgccggcgtattgggtcatgatgtcgccccacacggtgcagtcggtacgcccggcgttggcgatcaccaccacgtcacccggcagcacgtcttcgataaaatcgcctaccgagcctggcggcgtgttcgcgggtacgtattgcacggtaaaggccggaccaaccacggtgccgcggtagttatccagcggtgcgatgcccaggcactggccgggaatgcccagcttgtccatggcgtcggaaacgccgggggtgtccaggccttcaaacagggcgacgatttgctgatcttcagggttcatcgggcaggctccacgcggatggcttcaaattggctgtcatgcatcacatcggcgaccgagcggccgctgcgcacggcgtcgaccatgccggcttcacgggcggcgatgcgctcgctgagatcaagtacctgttcgatcacggcggcgggaatgaacacgctgccgcagcggtcggcgatcacgtagtcgtcttcggatacgtcaaccccgccgaccttgatggtcacgccagagtccacctgcaccacgcggttgcgcgcgctgatcatggtcacgccacgcccgtacaccgggtaaccgatggaggcgctgccgtcgatgtcgcggctgaagccatcgatcaccgaaccacggatcctcttggccacggcggcattggcgatgatgtcgccccagcacgaaatgccttcgataccgccggcgatcaccagcacgcggtcgtcggtggtgatggcgtcgatcaccggggaaatcaggtgcacgccgggggcggcgtcggtcttgggtgccagcttgaccgtgctcgcgcggcccaccactttggggcagtcccacaatgggcgaatacccacgacggcgcccggcagttgcaggaaatccagtgcgtcggaaaccgtgttggtgtcgagttcagccaggcgctgaagcgggtcgggaagtggcattgaggtgagcccctgttgtggttggggctcaagtcttaccgagggggtgtgccaggtatattcgtattaacgtaaggccaacatacgctgaacctatggtttggcggctgttttggcgcggcgcggcttgaggtgtttcaggcgcccgtcggccgccaatggcgaggcgtcttcggtcatcaggccttgcaggtggtcattgagcttggcgccttcgctgaggttatgcgcctcggacaaggcccccgctgtctcggcatcaccggccagaatcgcgtccacaaacggccggtgttgttcgatgatggcctcggcgtcgtgaatcaatgagtcgctggagcggatatacagacgaatctggcgctcgataaattcgtattgggacaacaggcggctatggtcagccaaggtgatgatcgccttgtgcagcgcgaagtcggcttcggcgatggcctcagcctctcccgcgtggcacgcctcgaccagcacctggtagtgctggctgagcaaggcatgcttggtgtcgtccatgcccgccgccaccagttgcgcggccaggcgctccacactggagcgcagggtgtagagctcccagacatccttgggcgtgagggaaatcacggtccagccggtgtaggggatcagcgtggtcaggccttccttttccagttggtgcagggccgagcgcacggtggcgcgcgacaggcccatctcctgggccaactgcacctccgtgacccgcgcccccggcagaatcgtgcccgacatgatggactcgcgcagcacttcggccgcttgcacttccgcagacagtttcacgaccttggggacttttaataggctcacggcgatgctcgactcattttcgtgcaggcactctagcaaacgcacaagattgtcgccaattattaaaagtcccgcccgtcagttgaccccacgcaacgagcgtacccacacggttttggtctgcacgtattgctgcaaggcttcaacgcccttgtcccgcgacagcgaacccgagcgtttatagccgccaaacggggttttcacgtcgccttcggtgaagccgttgatgccgaccacgccgcacggcaaatgccgcgcaaagtgcagcgcacggtcgatatcacgggtgaacaccgtggcatgcaggccgaactcggtgtcccgtgccacctgcaacgcttgctcgtcgtcctgcacggtgatcacgcccagcaccggcccgaagatttcctcggtggcgatgaccatgcccggcttgacgccatcgaacaccaccgggtcgacgtagaagcccggcaaatccagggcgcggttgcccgccagcaagcgcgcgccctcctccaggccccggttgatatagccctgcacgcgctcgcgttgtttggccgagaccagcgggccaatctcggtttcggggtccagcgggtcaccgaccttcagcgccgccacattgaccagcaccttttccaggtactcgtccttgcggctggcgtggacgatctggcgcatgttcgccgtgcagttttgcccaccgttccagaacgccgcgttgaccgcgttagcgatcaggtcgtcgctcagcggcgcgtcgtcgaggatgatgaacgggctcttgccgcccagctccaggccgaccggcttgaggttgctgtgggccgcgtattccagcagcagcgcgccgaccgggccggaaccggtgaaggtgatcgcgtcgatacccgtgtgcaggcccatggctttgccgacttcatggccgtcgccgggcaccacgttgagcacaccgtcgggcaggccggcgatggacgccagttccgccaggcgcagcgcggtcaacgaggtcagctcggccggtttgagcaccacgctgcagcccgccgccagcgcaggggcaagtttccaggcagtcatcaatagcgggaagttccacggcacaatcgcaccgactacaccgataggttcctgcaacacaaacgcggtgacgtcttcgccggtgggcgcgaccttgccaaaggtcttgtcgatcagctcggcgtaccactgaaagaaattcggcacttcggtaccgatttcatgcagacaatccttgatcggcttaccgctgtccagggactccatcaccgccagttccgtcgcgttcacgcggatcagttgcgccagcgcgagcagcacgtccttgcggtattccggcttggagcgcgaccacacgccggaatcaaacaccgcccgcgccgccgctacagcctgatccacatgccctgccccgccaaacgccacggtgccgaacacctgggccgtggccgggttgatgttctggtaagtgccctcaggcttgccgtcgacaaaacgcccgttgatatacggccggtcgggcagcaccagggtgtcggcgacacgttgataataggaagcgcccacgtagtttttcattgcgaacatcctgtgaagttgaggttaaacgctgagcaaacggcgctgacggcggcgacgcagcagcaccacgctcaagccgatcagcaacgtgccgacgatgaacaggaacgcagccgctgcaatttccgggctgatgttttcgcgaatgctggaaaacatctgcaacgccaacgtgcgctggccagggccggcgacgaagagcgtcaacaccacttcatccagcgacgtggcgaaggccaataccgcacctgaaagaatccccggcagcgccagcggcaaggtggtggtgcgcaacaccgtcaacgggctcgcgccgaggctggcggcagcgagttccagcttgggattgattccggccaacgcgccggacacgctgatcaccacaaacggcaccgccagcaccgtgtgggcgacgatcacgccgctgtaactgttggtcagcccgagggtttgcaggaacatctgcatgcccacgcccagcaccacggcgggcaccaccatcggtaacaggaacagcgagttgaccacgccgcgaaacggcacgcccttgcgccgcaaccccaaggccgccagcgtgcccaggcaggtagccaaggtggtcgcgcccacggccatgatcaggctgttgatgatcgacaactgccaggcttgcgccgtgaacagccgctcgaaccagcgcagcgagaacgagggaatcgggtacaccagaaacgagctggaggtgaaagccagcggcaacacggccagcagcggtgccagcaggaacaccaccatgcaggcgccgaaaatggccagcaacgggttggttttcattcgtcggcttcctgttcacgggtggaaaggcgcctgtacacggcgtacagcaccagggtaatcaccagcagcaccaggcccaacgcgctggccatgccccagttggcggcaccggtggcgtagaaggcgatcaccgaactgatcatctggtctttcggcccgccgatcagcgccggggtgatgtagtagcccacggccgacatgaacaccagcaacacgcccgaggtaataccccgcgtgctcaacggcagcgtcacttcaacaaacgcgcgccatggcttggcacccagcgacccggcggccggcatcaggttgcgcgggatgccgagcagcacgctgtagatcggcagcaccatcagcggcagcagcacgtgggtcatggcgatgatcacgccggtgcggttgaacaccagcgccagcgggtgatcggtgatgtgtagccacatcagcacgcggttcacgatgccgttgtcctgcagcacgataaaccaggcggtggtgcgcaccagcagcgaggtccacagcggcagcagcacggcgccgagcaacacattgcggcgccagccgctgacgctcgccagcaataccgcgtaggggtaaccgagcaacaggcacaacacgctaatggtcgcggtcatgccaaaagtgcgcagcatgatggtgcgattggccgaggcgtcgcctggcatgtcgacgatggcgccgaggctgtcgcgctgcaggtccaccgaggccagcagaaagcggtcggtcaccggcgccagtgcatcgcggatggtctgccagtaacgcaactcggcccagcgcttgtcgacgcccaccagatccaccgggccgtcggtggcctggatcgcggtttgggtcttgctgatcagggtgcgaaaacccggcgacgcactgttgaggcggcgcaccatttcgccgatgtgctgctggtcgtcgacgttgcggatatcactgacaaacgcctgctcaatggccgggcccggcaaggattgcccgtcccaatgcgccgcagcggcctgggtcagcggcaacacattgagcacggatttgtccgagaccgcctgttgcatcacggtgcccagcggccacaggaaaaacgccagcataaatagaaacagcggcagcaccagcaggatcgccgagcgccgtttggccacggtcagcgcgctcatgaggcaatcatccagcagtcccgtgggtcgaaatgcgcctgcatctgcgtgccgttggaatgttcaggctgggatcggcacaggcgtgcggtgagggtcaggttgtcgccggccagttgtgcgcgcaggtggtcgccctggtacacggcgtcgaccatccgcaccggcagcgagttgaccgggcgtggcgtgtccgacagcgtcaggcgctcggggcgcaccgagaccatcacgttctggcccaccttcaagcccgacgcaggcacgcggatggtcacgccactgccgagcagcacctcggcgcgctcgccgtcgatgctgaccaggcggccttcgagcaggttggtctcgccgataaactgcgccacaaagcgcgtttgcgggcggtcgtagatgtcgcggggcgagccgatctgttcgatcttgcccttgttgaacacggcaatgcggtcggacatggtcagcgcttcagactggtcgtgggtcacaaacacgatggtcaggccgaggcggttgtgcagctcgcgaatgtccaattgcatctgttcgcgcagctgtttgtccagcgcgccgaggggttcgtccatcagcaccacacgcggctcgaacaccagcgcgcgggccagggcgacccgttgctgctggccgccggacaactgggtggggtggcggtcactcaaggcgctcagttgcaccatgtccagggcgcgggccacgcgctgctgggtttcactgcggctgaccccgcgcatacgcagggggaaggcgacgttttcaccgacggttttgtgcgggaacagcgcgtaattctgaaacaccacgcccatgtcgcgcttgtgcggcggcaggtcgttgacggtaaccccgttgacgatgatgtcgccgtggctggcggtttcgaaaccggccagcatcatcagcaacgtggttttgccggagcccgacggtcccaacaggctgacgaactcgccggcctgaatgtccagggacaggttgtcgatcacgttgatggcaccataattcttggtgacgcccgcaaaacgtattctgaaatcagtcacaacggcatcctctgagcgtatttttgtcgtgcgcccgtaacccggggcgcactcttcaccgtggcaggacgtgcaaaaaaccagccgtgccctacttggcgagccaggcgttgtagcgggcagtcaggtcttccagatggtcgttccagaacgtggtgttcagtggaatcgcctctttcatgttctcggggttgctcggcaggtcgacgtaatcagccggtggaatcagcgccgccgcgtcgcggttgggcacgccgtaggagaccaggctcggaaacttcgcctggttttcggagcggctggcaaacgcgaggaattgggtggcaaggtctttgtgctcggcgcccttgaggatcacccagctgtccatcgcgtagatgctgcccggccacaccagtttgtagtgcttgtgttcggtcttgctgatgttggtcagccggccgttgtacaccgccgccagcgccacttcacccgaggccaggtattgcagcggttggccgccggcatcccaccaaaggatgttggggcgtagttcgtcgagcttgcggaacgcgcgatccacgccttccggggtgtccagcacggtgtacagatctttcggcgctacgccgtcggcgagcagtgcaaattccaggttgtacttggcgcccttgcgcagcgaacgcttgccggggaatttcttcaggtcccagaaatctgcccagttggccgggccgacctggaacttgtcggcgtcgtaacccatcgctaccgaccagtagtaaacgccggcgccgcaggtgctgatggcgtcgggcaggaacttgtccttcgcgatgatcttgctccagtcgagcttctcgaacagcccatcggcgcagcccagttccagcacatcggactccacctgcaccacgtcccagttagggttgccggccttgaccttggcttgcagcacgccgtaaccgccgtcccaggaatcttccagcaccggcttgccgacggccttggagaacggggcaaagtagattgccctttgcgcatcctgggtcacaccgccccacccgaccacggtaaagtcgcgggccgaggcctggcctgcggcaaccgccgaggccagtactgcaagggtgccgatacaacgcgccaatctgaagtgcttcaacatggtattcccctgatcgttaagtcacgcgtagccctgtcgtgcgcagggtttcagttcacatccatcatgcggaaccagctcgaggccacagcggcgtagagctggttcaatccgtgaaacgggatgcgcttgaggcgggtaacgggcaggcccagcgctgaagatcggtcgagcaaatgcgcggccagtgattggcccatcgcggtcatcatggcaatgccccggccctgacagccgagcaccgcgctgatgccgggcgctggctcatgcacgtgcggcaagtaatccggggtgacggccaactgaccagaccaggcgtattcgatggccacgccttcaagttgcgggtaggcctggaccatcaggcggtacaggtgcgagaagtccgacggcgtcttggcaccgcctgccttgccttcgccaccgaggaaaaaccgcccggcgctgtcacggcgaaagtactggatcaggcgacgggtgtcggcggcgtggtggccttcgggcaaaatcgtcgcgcccatggccggtgacagcggaatcgtggcgatctggaacgaatgaatcgggatgatcgtttgcttgagcccaggccacagcccgtcggtgtagccgttggtggcgaggatgacctgcgccgcgcgcacgttgcccttgggcgtggtcagcagccatttatcagcggcttgctccagcgcggtcaccggggtcttttcaaacacgcgcgccccttcgctgaccgccgcacgggccaggccgcgcacgtaactcaacggctgcaaattgccgccgcgcgggtcgatgatcgccccggtgtaggccgggctgccggtgatgcgccgggtttcttcgcggcccaaggtgcgcaccggcacgccgcgattaatccagccgttggcgcgccgctcaaggtccgcctcggcgctttcacggtgcgcgggcatcaaccagccgctgcgtttgatatggcactggatgtcgtaacgcgcgaccaggtcgaacaccacgtccggcgcacggccggaaaaatccagggcgtggtcggcgatctccgcgtgcttggccagcacctcatgggggtcgagcttgaggccggggttgatctgcccgccgttgcgcccggaggcgccgccgccgaccagcccggcgtccagcaccgcgaccgacacgccgcgcgaggccagctcgatggccgccgacaacccggtaaaccccgcgccgacaatcgccacatccaccaccaaatcttcctgcaacgcctgcaataccggcgcgctttcagccgtggccgtccaggcggcgcggtccagtggttgaagaatcgagttcagctttgtcttgctcatgtgcgcaccctgtctgcgggggaattggcgggaggtcaggcagcgtcggggacggccacgatcagttcgacttcgaccttgtagcccgggtcggccagggccggcacgatcaccagcgtggaacacgcgcgcacggtggggatgtagcggttgcggatggtgcgatagatcgcaatgtcatcggcgctggtcaggtaagtcgtggccttgacgatgtgctcgggcgaggtaccggcttccttgagcaattgcaggatgttcttccaggtgatgtcgatctgctcttcggcggtctcgcccaagcggccatcggggccgacgccgatctgcccggaggtgatcagcaggcgcgtggaacggtctactaacgcggcttcggaaaactgcgtggtgggtgccgggcgatccgagtaattcaaacgcgtaaacatggtgcctccagtggtggtgtgcgggtttaccaacccagggatttgaacagcgcaggaacgtgggacaggttcgggaaaacttcatcgggggtgtaatcgtcgggcgccttgcggcccgtgccccggtcgatccacacgcagcgaaagccgatgtcacgcgcggcggtgaggtcgagcagcggcgaggcgcagatgtgcaccacctcggccttgtccacgcccagctcgcggtgagcgtggttgaacaattgcggcgaaggcttgtacgcccgggcctgttcggcggtgatcacccggtcgatggtgccgcccagttgcgcgacgttgccggcgatcaccgagtcttcggtgttggacacgatgcacagcttgaagcccatgcgcttgagctcggtgagcgcggcgaccacttcggggaacggcggcatggccgagatgcgttgcagcagcaagtcgaaatcggcgaggtcggtgggcacgccgaaatgggtcatggcctcgacaaaactctgggcgacgatggcgcgaaacttcatgaatggcaccgattgctccagcacgtgttcacgctcgtcgtgccaggcgatgacctgcttgaggtcgatgtcggtgcgcccacggcgttcgaggatttcggtcaacgcggcgcgtacaccttcatcccactggatcagggtgccgtagcaatcgaacgtcagccaggtcggtttttggcccgtcagcatggggttctcctttgtttacggtttggcgatcaggacgagtttcaggtcgttgacgttggtgcccgtcgcgcctgtctcgatggcatggaaaatctgctccagcgccggcgtcacgtcgtgccgggccagggcctggtgcaggtcgacacccagctccagcgcgcgttgcgcggtgctgccatcggcgatgccgccggcgtaacgggtcggcccgtcggtgccgtcggtgtccaggccgagcaccacgatggcgcgcgtgccctgcaactccagcgcggcgctcaccgcgaattcctggttggggccgccagtgccgcgttggccgccggtggtcacggtggtttcaccgccgccgatcagcacgcacggcgggaacaacgggcggccgtcgagggcaatttgcttggcgatggccaccaggttgcggcccagtgcactgctttcgccttcaaaaaaggtcgacagcagcagcgggttgtagccattgcgccgcgcttcgttggaggcgccgatgcaggcggcgtcggccgcgacgaggatcacgtcctggcaggtcaggtgcgccagctcttcagcgcgtacggtttcatcctccggcggcgccaggcgcaaataagcggcgatggacaccggcatgcggtcccacaggcggtatttgtcgagcacggcctgggcgtcggcgaaggtggaacggtcgggcacgctggggtcggtgatgtagtccagcgcgtcgccgatcacgtccgacacggtgaggttgatcagcaccgcgccgggggcgaggtggcgaatcaggcggccgcctttgacggtggagaggtgtttgcgcacgtcgttgatttcgacgatgttcgcgccgcaggtcagcagcaggtcgttggccagggccttttcggccaatgagatgcccggcaccggggcgacgaacaaggatgacgaaccgccggtgaagcagccaagcacgatgtcgccggcgcgcacgtccttgagcagttcgacggtatccgtcgccgacttcaaggaagcctcgtccggaatcgggtggctggccaggcgcagttcgatatggtcgaggctgccctcctgcccgtatttgcaggtgaccaagcctttatggatgcgtgcgccgagcagcgcgtcgagtgccttggcgatgggaaaactcgccttgccggcgcccaccacaaacacgcgcacgccgtcggccagtgagtaacgttgaccctcgaccaccagggtgtcgccttccaaagtcacgaaacgctgcactgcattgccggggtcggcgtaggcaatgcccgcctctgcaatgctcagggccaggcggcgcaatgccgtgtcgccgctgccctgcaatacctctcggttcttgatggtggtgccggacatcgggtttctcctggcggtggataaggtggcgaaatcgattattgaagaatgtcgacaatattacaatacgtcagaaataataaattgattattgtcgacaataacgatgatgagtatgctggcacctgtcttcactgctgtctgaaccaccctaaccctgcaggccaaccgccctgcccgcccggagtgcaccatgactgacacgcccaagcgtcacgccacgatggtcaacgctttcaaccccgaaagcctgaagaacctcgacgctgacacccgccaccagatcgaaaggcgcatccgcctgctgggcccggcctatcgcctgttctatcaaaacccggtgcaagtcagccgtggccagggcgtgttgctctacgacaagcacggcaatgaatacctggatgcctacaacaacgtggtgtcggtgggccatgcgcaccccaaggtggcggacgcgatcagccgccaggcgcatacgctatgcacccacacgcgctatatccaggacggcatcctcgactacgccgagcaattgctcggtacctttggtgggcgcgtgggtgagtcgggccacatgatgtttacctgcaccggctccgaggccaacgacctggcgatgcgcatcgcgcagcaccacaccggcaagaaaggcatcatcatcacgtccgaggcgtaccacggaaattcgcacctcaccgccggtttctcgccgtcgctgggtgccagctcaccgctgggcacctgggtgcgccgcgtgccgacgccggactcataccgcatcccgaaagaaaccatgggccagtggttcgctgaccaggtgagcctgcagatccaggacctggagcgccgtggcgaaggcctggcggcgtttatcgtcgattcgattttctcctccgacggcgtgttctccgaccccaccgacctgctcgggccggtggcggaagtggtgcgcaaggcgggtgggctgtttgtcgccgatgaagtgcagtcaggttttgcacgtaccggtgatgcgctgtggggttaccagcgccacggcatcgacccggacatcatcaccctgggcaaaccgatgggtaacggcttcccggtcgccgccatcgccatcgcgccggaaatcgtcgcgcgcttcggccaggacatgcgttacttcaatacgtttggcggcaataccgtggccatcgcagcggcgcaggcgacccttgatgtgatcaatgaagagaaactgctggagaattcggagcgcgtgggccgctttatccgcgccggtttcgaggatatcgccagccgctatgaacagattggcgacgtgcgcggcgccggcttgtatatcggcgtggagatggtcagcgaccgcgagaccaagaccccggacgcggcgctcacgagtgccatcgtcaatggtttgcgcgagcggcgagtgttgatttcggccaccgggtttgccgccaacacgctgaaaattcggccaccgttggtgttttccgagaaagacgccacgcggctgttgacggagaccgaggcggtgttggcgacgttattgaagtaaatgacaagcgggctgttgtggcgagcgggcttgccccgcgttgggctgcgtagcagccccagtcccagacgccgcgttccttcagaaagaacgcggcgttttttatggggccgcttcgcagcccaacgcggggcaagcccgctcgccacagggagcctgctcgccacagctgctccgttgtttatcagattctgaattgccccaccaattgccccaaacgctggcccaggtccgccaagctgcgcgaggtctgcgcccccagctgggtctcatccgccacactgtccaccgccacggcaatctgatgcacgctgcggttgatctcttcggccacggcggtttgctcttcggcggcgctggcaatctgtgcgttcatcgaattgatggtgccgatcaactgggccatggtgtccagcgacgccccggcttcgttggctttggccgaggtaccgtcgccggcatcactggagcggcgcatggcatcgacggcggcgaccgtgcctttttgcagacggtcgatcatgccctggatttcctgggtgctggtctgggtgcggctggccagggcgcgaacttcgtcggcgaccacggcaaaaccacgcccggcctcgccggcccgcgcggcttcgatggcggcgttgagcgcaagaaggttggtctgctcggcgatggaacggatcacgccgagcacgctgacaatcgacgacacgtcctgctgcaggctgtcgagggacacgccgctgctgcggatgtcgttcaccagcgcatggatttgcgcaatgctgccatccaccacgcgcttggccgcctggccttcagcgtcggtttgctgcgcggccacggcggcgccctgagcactgcgcgccacttcgtgggcggcagacgacatctggttgatcgcggtggcgacctgatcagtttcgtgacgttggcgttccatagcctgctcggagcgttgggcctgatccgacacctggctgaccaggccggtgagttggcttgtcatttcagtgatctgacgcaccaggccgtggatcttgtcgacaaagcggttgaacgcgccggccagatcgcccagttcatccttgctggtgatggccaggcggcgggtcaaatcgccctcgcctgctgcaatatcgtcgaggttggctttcatcaaatgcaaaggccgcaggatggtattcgccagtaccatgcccaccgctgcaatgaccaacagcaccaccacggccacgccgaggatgctcagcagcacgccttccatgcgcttttcgaccttggcttcaaccactgccacttgggcttcgatgccatcgaggttcaccgaggtgccgatcaccatgtcccatttgggcaggtattcggtgtagccgagcttgggcaccagttcggtctggccgggctgggtcgagctgtattgcaggtagtgggtgccgtccttgccgaccttgaccaggtcgcggttgacgtagacgccgttggggtcgcggttgtccttgaagctcttgcccacgccgtcggggctgttgcccttgaacaggcggatggtttcggagtcgtagccgaagaagtagccgtccttgccgtagcttgtatttgacaggagcttgaccacttgggcacgcgtggcggtgtcgcctggggcggcggcgtcgtagaggggtttgatggtggtcatggccacctcgacgtaactctgcagggttgccttggcgtcgttgagcaggcgctggcgggtttcgtcgacctcattgtgggcctgggtctggaggatccacacggtggtcaggctgatgacagcggcgaacagcaataccggcactatggcgagggacaggactttggccttcaggctcagacgcatgggattttctctcttgttcgtggcgacttgagaggttaacggcgggttggggggaatctgtaggtgggggtggtggcggagttgcgtgtatatccgttatttgggtgatggccgatattggttccgcccttacggcggctcacttttgaacagcgcaaaagtaagcaaaacgctcttgccccaacactcggcacctcgctcacgctcggtgtgcccgtaatccgacagggatttggggggccgccgccacgcgccatccatggcgcgtcgcggctaaaccggcgtcctgccggtttaccccccaaatccctgtcgaattccggccagcgtgttttaacggggcgcccaggatcaaagtcaaaagcagatcacaagcacggcggcctgacagccggcctgagtggtgtggagcaaaagcagtcgagtctgggagccggcttgtgtgggagctggcttgtgtgggagctggcttgtgtgggagctggcttgcctgcgatgcaggcaactcggtacgtcaagcacacccagttgatgccatcgcaggcaagccagctcccacggaaaagcagatctatgcagatcttgaagtattactcggttagaaatgtgggagcgggcttgctcgcgaatgcagggtgtcagtcaatgaatcaattggctgacccaccatgtgtccggtccatacagcttcaaagtgacccgccgtaagggcggaaccaatatcggccatcacccaaataacggatatgtacccagcagcaaaccatcaaagcgtcatcgccgccaaccacccaaacgccaacaacggaaggttgtaatgcaaaaaggtcggcaccaccgtgtcccagatatggtgatgctgcccgtcaatattaagcccggaagtcggcccaagcgtcgagtcagaagccggcgaccccgcatcacccagcgcccccgccgtacccacgatgcacacaatagccaacggactgaaccccagttgcacgcacaacggcacaaaaatcgccgccagaatcggcactgtcgaaaacgacgacccaatccccatggtcaccaacagccccaccagcaacatcaacaacgcgcccacgccgcggctatgcccgataaacgctgcggaagtttccaccagcgagcgtacgtcaccggtggccttgagcacctcggcaaaccccgacgaggcaatcatgatgaagccgatcatcgccatcatcttcatgccttcggtgaacaggtcatccgtctcacgccagcgcacgatgcccgagaccgaaaagatcagaaacccggccatggcgccgatgatcatcgagtccagccacagctggatgatgaacgccgaggcaatcgccagccccgccaccaacagggtcagcgggttgtagtgcaccgccacctgctcgactcgctcgattttctccaggtcatatacgcgttttttacggtagctgataaacaccgccaccagcaggccaaccaccatgcccaaagcaggcagacccatggcgtgggtgacgttgacctggctgatgtccaccccactcttggccacgttggccagcaggatctggttgaggaaaatattgccgaagcccaccggcaggaacatgtagggcgtgatcaggccgaaggtcatgacgcaggcgatcaggcggcggtccagttgcagcttggtcagcacgtacaagagcggcggcaccagcaacgggataaacgcaatgtgaatcggcaggatgttctgcgaagcaatcgctaccacccacagcaagccgatcaacagccatttgacgtggctgccgccggtagcttcctggcgatccaccagcatcagcgccttgtcggccaacgcgtgggccaggccggacttggcaatcgccacggcgaaagcgccgagcaaggcgtaggacagcgccaccgtcgcgccaccgcccaagccaccgttgaaagctttgagcgtagcctcgatgccaaggccaccggtcaacccgcccaccagggcgccgacaatgatggcgatgaccacatgcacgcgggacaggctgagcaccagcatggtgccgaccgcggcgatgactgcgttaatcatggttacctcaagcaaaacaaaaaaacaggcatgcccgcgcccgggcggccagtgtggctgccagcgtgcaggcttgaaggaggtcttattagagggcgcgcactgtgccgcaggcggggcagcatgtcaaaaaacggcgccgctttcaggtttaaattgatcgtttgaataaagaaaattcagaagaagccgataacctgattctctgtgttttcaggttaaggatgcacctcgatgtccgtcagacagctctccattcaatggaaaatcaccctgctcgccggcctgtgcctgctggggatcgtgaccctgctggtgggtctgtcgttgtatcgcatggagcagagttcgcagcaggtcaaggcggccagcatgcagatgctcgacgaagccgcccaggcgcgtattgaggcccagggtgaagtgcaggcgctgggcatccgccagcaattcatggacgcctaccagtacggccacggtttttcccgccaagtgctgtttttgcgcgagcaggcggaaaaacgctttctcgacgccttcgacacccgtgaagacctgacccgccaggttaaagccgccctgcaagccaaccctgacctgctgggtttgtcgctggtgttcgaagccaacgcgctggatggcaaggatgagttgttcgccaaccaggccgagctgggcagcaacgacaagggccgcttcgccctgtactggtcgcaacccaccccaggcaaactggagtcgatggcgctgccggaaagcgacatggccgacacccgcgtcggccccagcggtgaaaaggccaacgcctggttcacctgcccgcgcaccacgctcaagccgtgtgtgatcgagccttacttctatgtcatcaacgggcaaaacgtgctgatgaccagcatcgtgttcccgctgatggtgaatggcaaagtcatcgcctcgctgtcggtggatatcaacctcaacagcctgcaggccgtgagccagcaggccagccaaaagctgtatgacggccagacccaggtcagcatactcagccccaccggcgtgctcgccggctacagcccggacgccagcaagctcagccagcgccttgaccaggtcgataccgccagcggcgcgcaattgatcagcgccttggccagcggcagccagacccgtagcctgcgcaccgatcaccaactcaaggtgctcgcccccttcacaccaattccgaacggcaaaccgtggggtgtgttgctggatgtgccggagaaagtcctggttgccccggccgaagcgctgaaagccaaactggataccgacaatgccaagggcaccgtgctggaactaagcctgggcctgctggcagcggtgatcggcctggctctggtgtggctgatggcgcgcagcgtgacccggccgatcctcggtgtggcgcgcatgctcgaagacattgccagcggcgaaggcgacctgacccgccggctggcctacgacaaaaaggatgagctgggccaactggccggctggttcaaccgctttctcgacaagctgcaaccgatcattgccgaggtcaaacgctcggtgcaggacgcccgtggcaccgccgaccaatccgctgcaattgcgactgaaaccagcgcgggcatggagcagcaataccgccaggtcgatcaggtggccaccgcttcccacgaaatgagtgccaccgcccaggacgtcgcccgcagcgccgcccaggccgcgcaagcagcccgcgatgcagaccaggccacccgtgaaggcttgaccgtgatcgaccgcaccaccaccaatatcgggcacctggcggcagacatgagcaccgccatggcccaggtcgaaggccttgcggccaacagcgagaagatcggttcggtgctggaggtgattcgcggcattgccgagcagaccaatctgctggcactcaacgccgccatcgaagccgcccgcgccggtgaggccgggcgcgggtttgcagtggtcgctgacgaagtgcgcaacctggcgcggcgtacccaggagtcggtggaggaaacccgcctggtgatcgagcagttgcagagcggcactgaggaagtggtgggttccatgggcaacagctatcgccaggcccagggcagtgtcgagcaggttggccaagcggtgaccgccctgcgccagatcggcgaggccgtgacagtgatcagtgacatgaacctgcaaatcgccagtgccgccgaagagcaaagcgcggtggccgaggaaatcaacagcaacgtggcaacgattcgggatgtgaccgagtcactgtctgaacaggccaatgagtcggcgcgggtcagccaggcgttgaacagcctggcgaatcagcagcaggggttgatggatcagttcagggtttgatgcggctggcgacagactgtgggagctggcttgcctgcgatggcatcactgcggtgaacctgatacatcagggtgcccgcatcgcagcggtgcgacgattcgacaagccagctcccacataagccagctcccaccgtttgatcggtgtcagcgtttgggcaactcaatcaacactttcaacccacccagttcactctcctgcagctgcaacaccccgccccacacctcgacaatatcgcgcacgatccccagccccaaaccatggccgtcaatctgttcatccaagcgcgtgccgcggctgaacacttgggcacgctgggtttcagggatgccggggccgtcgtcttcaacctcaatcagatagctgtgcgctgtttcgccgatagtcacgcgtatttcggcatcggcccatttgcaggcgttgtccagcaggttgcccaacagttccagcaggtcctcacggtcccaaggcagttgcaggccaggggtgacgtggtggctcaagtccaagtgttcaccgtggatcatgctcaaggtggcgagcaggctcggcagttctttttcacagtcaaacaaggcgcctggcagggtttcacccgccaggcgagcacgattgagctcacggttcagacgctgttgcacctgctccagatgatcgcgcagcaatttagccagctcggggtgttctttcagctgttcgctggacgccacgctcagcagcaccgccaacggtgttttcaacgcatggcccaggttgccgagtgcattgcgcgaacgcttgaggctgtcttcggtgtgcgccagcaagtggttgatctgcgccaccagcggttccagttcctgtggcacttgagtatcgagttgcgagcgctggccttgttgcaactgggcaatctggttgcgcgcggtttccagcgggcgcaaggcgcggcgcacggtcacccgttgcaggatcaacaccagcagcaacgccaccaaccccagcaccagaccaatctgacgcatcacgcgaaagctttcccgcaccggcgtgtagtcctgggccacgctgatggaaatcgattggccgaagcgtttgtagtcctcacgcaataccagtagctgctgcccttccggccccaactgcaagttgcccttgatgccggcctcgggcagacgcggcaggtcctggtcccacaatgagcgggaacgccagtgtttgtcggcaaaatcaatccggaaatagtgcccggaaaacggccgttgataggccggtgacaagcgtttctcatgcagttgcaaaccatcggggccacgcaccaacgccaccagcaagttctcgctgtcgttgcgcaggccggcttccaggtagcgctgcaagccggcttcgaacaaccacaggctggtttgcgccagcaccacgccgaccaccaccatcacgctgatcagccccaggctcaggcgccgctggatcgacctcatgcagcgccggcgccaaaccggtaaccctgcccgcgccgggtctcgatcacattgcggcccagcttgcggcgcaggtggttgacgtggacttccagcacattggagtcgcgctcggtctcgccgtcatacagatgctcggcgaggtggcctttcgacagaatctgctcggggtgcagcatgaagtaacgcagcaggcggaattcggcagccgtcaattgaatctccgcaccgtcacgcagcacgcactggcgaccttcatccagatgcagcccggcggcttgcaacgtcggctggttggcatggccatgggagcgacgcagcagcgcctgaatacgcaggtgcagttcttcaggatgaaagggtttgctcaggtaatcatctgcaccggccttgagcccttcgatacgctcggcccaggagtcacgggcggtgagcaccagcaccggtgtgacaagcgcggctgctcgccattgcgccagcacctccagcccgggcaaaccgggcaggccgaggtcgaggatgatcaggtcataaggttcgctgcggccctgatacacggcgtcgcgcccatcggccagccagtcgacggcgtaaccctggcgctgcaggccggccagcagttcatccgccagcggtacgttgtcttccaccagaagcaggcgcatcagtcgtcttccttatctttgagcaatacaccggttgtagcatccagtttgatttcgcgcaccacgccctcaagggtcaccagctcgacttcataagcatattcaccgtgtttcttttcaagctcggcttccaacaggcgcgagcccgggtagcgtgccatggcttgctgcaacagctgctccagcggcaggatcaccccctgctcgcgcaaggccaaggcttcatcctggttgaggtcgcgggcgttgatgcttgaacaaaaggccaggagcaccagcaccatcacaccgccggcgcgtcgatataccgtcattacgtatcctgatgattcttgagaacgtgcccggtgagcgcgtccaattcgacttcccactcgaccccgtcggcatcttccagttcgacttgatacaggtaagtgccgtaggcctcatccaggtcggtgtccagcaaggtcgaaccgggatgcaatgccagggcggtggcctccaattgatcgaaggcaacaattgtaacagtgccaggcaatttcagcggtttgtcggggtccactgctcgggcctgtgccgccatagaggcgatgataccggcggcgaccagcgctgtgaggcgcttcatggtgagtctccgtttcaggatgtttttcctacgccggccacggtaaccatcgcaacttaactgaaactgaattgccaccatggcaatttcctataggcatatccccctatcaacgtacgagttttcctatactgccccgctcgttgcaaaagagaccggtatgacagccatccacatcaaatttccggccctgacgctcaaagccggtaaacgcgccttcgcacgcattcgtgagagcggcttgaaacctgccgacgtgggcattctccccggcgctgccggcggccccaaagcgttgggcatccagggcctggacctggcgctgttcggcgactggctgccccgcgcgccacgcgaacgcgcgctgatcggcgcgtccatcggctcctggcggtttgccagcgcttgcttgcccgatccggtgcaaggcctgctcgaccttggccgcctgtacaacgaacagcgctttgccaaaggcgtgaccatggccgaagtcagtcagagctgccagcgcatgctcgatgacctgctggccggccgcgatgcgcgggtgctggacaaccccgactatcgcctgaacattatggtcgtcaaaagccatggcctgcttgccgatgaccaccgggggcgcctgggcctgggcttgtcgtcggtgattgccgacaatctgcgggggcgtgcacggctgtcgcggcatttcgaacggctgatcatccacgacccgcgccaggcgccgccggtgcatccgctgaaggattttccgtcgcgcttcctcaacctggaactgggcaacctgcgccaggcgctactggcctcgggctcgattccgatggtgatgcagggcgtgcgcgacctgcccggggccggcgagggcacctaccgcgacggcggcttgctggactaccacctcgacctgccctaccacggcaatgacatcgtgctgtacccgcatttcaccgaccgggtcatccccggctggttcgacaagggcctgccgtggcggcgcagcaatcaacagggtttgcaggatgtgttgctgctggcgccgtcgaaggactatctggcacgcctgccccacggcaaattgcccgaccgcagtgatttcaagcgcttcatgggcgatgacccaagccgcaacaagtattggcaaaccgctatgagcgagagccaacggctgggggacgagttcctgcggctggcggataacggtcaattgggcgagcgcttgcaagcactttgactcagcggtatgcgcggcgagggatcaagctgttaaactcgccgcctgccagacacctgaccgagctgaaaacactgtggaaatcttcaagaattccacggttgcatcccaccaaaaaccgtcccgcatcacaattccctcgaacgcccataagccatagcgttgggcgtatcaccgcgtaccattcaataccttcccaatgcaaaacagttagtacattatccagtacattgaaaattgaatgcgtggagcaatgtactagtggcactcacggacacagcagcgaaacaggcaaagcccaggggaaatggatacaccatccccgactcgctcggcctttcactctttgtggcgccaagcggcgtaaagagttggcactttcgatttacatggcttggaaagcaggtgcgtatctcgatcgggacttacccggagaccggccttaaggaagcgcgcgcacgcagagacgaggcgcgagaggacatcgcgaatggggtagatccgcgcgattcaagaagggaaaagaaggccgggatgatcgcggcaggcgggcaaaccttccgtcgtgtctatgacgaatggctggcgttcaggaaggggagcatttcgccgggcacctacagggtgatcagcaatgccatggcgctggatgttctgcctacgcttggcgagcggcagatcgacgctatcaagcgcgccgatgtcattgcactgattcgccgggtggaaaagcggggatcggtggccactgcagtgaaggtccgccagcgcatgagccaggtgttcagctatgccatcgctactggcgtcatagaggcgaatcccaccgccgagatgcacgccgtgaccgagaagatgggccagcacaagccgcacccatttctcccgttcagcgaaatgcccaggattatggcggcgatccgcgactgcgcctcaggccaacagctgaaagccgcgctgatgctgatgatctacaccgcttcccgtccgggtgaggtccgacacgccgaatggtcggaaatcgaccttgacgccgcgatatggaccacgcctgccgcgaaaatgaagatgcggcgggatcacgcagtcccgctatcgacacaggccataaccatactcgagagcatgctccccatcaccggcgacaagcggtacgtgttcatcaaccgcaacagcaccaccgcaccgatcgggaccaactacgccaacaacgtcatggattcctgcgggctcaccggcatccagtcaccacacgggttccgtcacctgttctccaccgagatgaatggacgcgggtacaaccgtgactggattgagagacagcttgcgcacgccgatagtagcttcatccgtgacgtgtataaccacgccacctatctagatcagcgccgggggatgatgcaggaatgggccaacctcgttacaccagaggccgaccccgtaaaataaactactttacagctgtcgtttcccaattcgaaagctctagtaaaacggcggcatcaccatcattgttccagatgtgagtaccagacccccaatatatgtactgccatgtaaccccatcatgtacctcgattcggtctgcgccctttccggtccagagcgcgaccatcatcccggccgtgacatcgatttgaggcaaccattttacatgacgatgagcattcgatattccgccgccaccagcaaaagtcgtgtccatcaccatgtagtgcgacagattgcagttcgcaagtacccttagagagacgtgctcttgattgagatttccacgattgttgacgctgtccacttttagcttcatcacgcgctccgattctaaatatgagcgaatgactttagcccacaaaacccaaagtgccatcacggcgaagttagaagcttacacaacactcacgataactccgcaagccctacagctcgtcgcctcaaatcgcgccatcgcaaaacctcgattactgtatgcgcatacagtatatgagttttcctaccatgaacatcgacgaagatacctcagagtggcttggctgccccgcgcctctggaaatgtaccaacatcagtgcgccctactagaggacgagctcatccaaaccgaggcgatgctgcgaaaggccagggccaatgtggccggcctggtgcagatgaatgacctgctcgccaccggcaaggcatcagcagaggcagcactgagggaagcccttgagcgcatatcggcaaggagtgatgagacgccaaacaacgtgagctttcgcccaatcgacctgatcacccagcagcgcgaccatctgttcagggagaaccagcggttgctcatggagcttaatgtgctcagggggccacggtcctgacgtacgcttggcacgcacgcagcgcgatcaaggcgttatccccgtcgttggtgatgccgataattctttgagcatgcgctgggtcaagttgggctcgacgggctgcatgaaccacgccgacggcgccgggggcggcaggcacgtcgcagccactggctgtatccgtggcgtcgagtaggactgacagccgcacatcagcagtggcaaggcgatcacgcagagcagcctgtttgcgttgttcatcggaaagctctcgggtgtgttgttggtcttgggcggcgagcagctgctcggtggccaggcgcttgtcctgctcggcgcgggcctgatcggcagcggcattgctgatcttggtcaggtccgcctggtgctgcctgccctgctcggcgagcttcttggccagtcgccagtcctgcacctgccacgccgcgccggcggcaccagccatcagcaccaggatcagcaccaccaatccggccagcttctgcaccggcgtcatgccaatgcccgccgcacgccttcagcgagcaccgcgtcagggtaggcataccctgcgttctcgtgatgaatgatcgccttgacgaagccggccatcacctccggctgggctaggtcaacctcggcgccctggcgggtgccggtgttcgcctccaccgcgcgcacgtaagcagcggtgtcgttctccgccgccggcgcccaccggctgatgatggccttgaccgtcttcagcccatgcttacgctggtaggtcagcagcaccttgcccagcgcacggattccgttctctggtgtgtcaaagcgtgcgaaccgcttctcgatggctggatctggcttgagctggccctgccactggttggccgggctgtaatcgatgttgcccgggttgcgattacgcaccccacgtgtttcggtgatcggcatacttttctccaggcgaaaaaaaaccgctcaaggcggtcgtggtgttcgatgtgccggtcaggcttcggcaggaacgtcgaccgctggcagcgggaaccgcgccttgatcgcagcgacggatgccatccaggtggagtaatcaggctcgcggccttggctcagtgcgtcgtaatcggcctccaggcgcagagggtcggattcggactgataggcggttcggcgagaagccagggcggcttcccggctcacgcgctgctcatccgccaaacgctgtgcggcggtaacagccatgctgaaatcgatagtcattctggaaacctcacggcgccgtcagggggattgatgatgtcggccgggaacagagccgccgtgctggcatcctcgcgataagccatcagcagagtgatcaccaggtcgccgccgatgcgctctaccgggcggaagatcagcgggcaatcaatggcctccgctggaagaattgcgccgtccggcagcgggctgaagtcgaactgctggccgttgatggtcagcacatcgccgagcttggtcacagtgagggcttcgtccgaacggatcgggatcaatttgataatcatcagaaccacctgccttgcgccatcatgacgaattccgctgttatggatcgggaggtcatcgacataatcagaccctggtacgtggttgcagtgactgcgttcggctgtgacgccacagtcattgcccgggcgttgagcgtgaattcaggtgccgcgctgaaggccacggggaacccgaatacgggggtcgcaccgatgaagaacccatcctgagcaaaagtcatcgcctgggtaaacgtgagtgttgcccggcaaatcatcgtgccgtcggcaaacttggtgtagctgcctgatgcattcgatccgcgctcaatgacagcgccggtgggtacgccaccagactgggagacagtgccaaccagcgcagccactgccgcagtgccaagtccaaggcccgagcgcgctgaagcggcggttgtaccacccgtgccacctttggtaaccggcacgacgttttcagtcgatacgctgcccaatccggccagggtcgagccccattgctgaatcattgcccgagcctggtcggccaggtctttcgtgtagccctgcacaggggtcagcgaataagcgcccgccccattcgttgcgcctcggtagggtggcgcgatcgacatcgcggtatcgctggcaatgttggtgacctcataccaccctccatctggaccgagaaaggcgtcgcctacccggctgttggccacaaaggcagtgccagtaccgataacggcattggagttgagcgttacggatactgtgccggctctataccaaggcatatatttctccacacgaaaaaaaccgctcaaagcgggatctataaaataatcaagtcagttgaatgggaaaggtaagcccgctgtctttataactagcgcagatgggaatctatcaactggtaacgcttcatatgacgtattaccctgggttgtagctgtccactgctgttgctggaccctccccggcgatgcaaataaaaacgatataccccccatccttccgtatgcgccctcggatacgccccatatgcttttacctgaagagccagaaatgtagacgctgatcacgccgcaagatctactccatggcaaaaatgccgcatattcttcccctggctgcaatggtatatccactacgcagtgcgccatgcaatttactgatgcgttctgccattggtttatctcatttctcccgccgctatatgcaagcaccggccttccatatagatctagagcacctggacctggagcggttatagaacttacaacattgaggggtatttgccctgagttgaatgtaacaactccaccttcactccgtgtcttaagtgatgcgccgactaacgcgtcatccttcatgaggtcgaagcaataatatctggtagaggcttgtgcgcccgcgaataggtatgtcttgcttgttcctgaaacccttactccggtagctactcccttgccaacaaggaaaactataggtgagcgtggattgtcgatagaaaaagaatattgctcatcgccggtccttgattgatcttgccagctgctagcgagattaggatctacgttaatgcctctcaactctagcctcttccagctttcaatatatgcaagatacccactcttaaccaatccgtagctaatactgcccgtatcgtacagtagagatccatcagatttttttaccgtaaggtgtccgccagccattagtaatacccataatagattctgcaattagccgagaaaaaaccccagcctgctgtgctgtatgaatatgaccagctaaggctggtgccgctcaaaataacacctggcctctttcctttttcaatctgcaaatccactagaggagagaccgagaaaaatagattccttccttgtggcgcggcaggtatctgaattgatcccgcctgtccattagtatcaacgctccccagcgcctggctgataaatccggtcatatccaccttgaccagccctgtgtctctatcccttatcactaatccgaccatattaaagactcagatcaataccaacgacaccattggcataaataaatttaaggaacgtattggtaagactcatagttccgactcctggaacacttccgttcatctcaaaggtgccatccttcgatagacgccagccctgcacgccagccacatagttgtctgactgcaatgcctgcccgatcttcagcatggtgatgctgccgttctcgatcagcacggagttcataaagacctgcccgccctgcaccacaaacggcgtagtgatggttcccccgttcagcgtgttcaccacggcaaaccgatccgcactcaccaaaaactggctttgcagcaggccatcggcgttctgctcgatgcccaggccaatcccggccgcaacatattggccgttctggttcacctgcattttcactgcccacatcgtggacagcttgccatcagtgcttgcctgcgccttggccgtgatctggatcgcggccttgttcttccattcgctgagcgcgctggcgagctccccttcgtccgtgccgtctcgcccgccgcctgcaatggcttcgagcgtggtggactgcgacgcgaccgctttttttgtgtcgaccagggactggctgactgtctgcacggcggcagagttgtcatccactcggcctttcagttggtcgatacgctcggcggttgccagcttgtcggtggccaccacctgctcaagcgtggtgagtgccgccttgttctggccaactgcagcgtcgagcgcggttgtgcgctcgaccatggccaggttgtccgaggcctgcaccttgacctgctgagcaaacttcgcggcggcatcccagctttgaatggtgccagccagatcaccctctccgtcatcctccctccagcttgcctggagagattgcagtgcggaggcctgcgccgtgaccttgccgtccacggtttcgattgaagccttgttctgctggatctggagcgccatggcctgtgttgtttcggcgatggtgcccaggttgaaccagaactcagcagcaggcggcgggttgtcgaccggtaccgggttgattgcctggtacaggttctgcccctgccgcacgatctccccagggctgtaggtcttggccggatcgtaggcaagtgcatctgttatctggtcaatcaggtcttccagttcctgcttggcctgctccagacgatcattgaccgagccggggcccgaaccggagatcagttcgatctcgtccaggatctctttgaccaactccgtcttcccaacttgcccggcgatcaggtcaaggatcgggcctgcctcggaactggcctgcccgaggacaccattaaccacagggaagaacggcccgacgttgccggtacggtctaccaggcgcgcccagaagaagaactgtgcacccgcaagcagcgactgcatgcggtagtcggcttgcggatacgccagatcggccagtttggtcgcggcgcccaaatcattcgccgggccataccacagctcagtgcgctgggtgtcctcggcgccaggtgggaagccccacttgatgctgatgccgaacagctcgctggtagcggtcaggaacgacactgccggcggcagaccgactttgccttccaggttggtcagcggcgaggtggtagggatcgaggaaacgttgagcgcacttacagcgcgaaccctggccatgtattgaccagagtagattccgcgtacatcgaccatttgttctgcagtgcggggcacggttatccattcccgggcaccccacttccattcaacatcataagccactgcgttaggcgcagcgtcccaggcgatagacattacggtgacggctattccttgctctatcacgacgtgctggctcagcattacgcgcgccggagcgtcctgactgccaatcggaatgccagtgattggccgggtatccaccacggcaccgttatcgatagccgggaacttgctcggatcgtgctggatcacctcgagctggtactgatgccactcaggccgcgtaacattgcggacgtagaactgcatcagcttcaagtcttcgtagtcgaggatccagccacactcaggctggggctgctcgctgaagtcggccatcaccgtcacattgcgaccagcaaccgctttaaccacgcggccttcagacttgccgctgggcaagttgaccatcaagcgcgcgccaaccggaacgacagtgtctcgatcaagagtaaccacccgtccggttgccgccgcgatccggccgccattgtttcggccaaccagcattgggtcggctacagcaatgacctggccaggctttggaatgtcgccgtccaggccaacgcgaaacacgccgccctgcgtttgcaacttttcggtgagcgccgcccactgcccagctcgctgtgcctgtcccaacgaggtgcaaccaatagcgccaatggtggtatcgcgaacaatcccaccaagctcgaccatggcttcatcatcgaaaaccggctctttgtcggtttcgaatccctgatccgggttatcccaggacaccatgtagagggtgtggcgatcacgcgcccgggtgccttcgtatttgatagccccattgttcaggatctgagtttggttataggtgtacaccgggtcgccgggcatatcggcattgaccactatctggctgccgtcccaataagccaggccatggaagattgacgccaagtcctgaagcacggcgtacgcctctgcctgcttctggaagtacaggttgcaggtgaagcgcggctccatgccgcccttcccatctggcaccgattgatcgcagtactgcgcgatgcgatagagcgaccagcgatcaaccatggtggcgtcgatccggtcgcccaggccgtaataagggtgcagcaccaagtcgtagaagatccacgcagggttatttgtgtaggcctccttgaaggtgccatcccaaactccgttgctggtgccggtgcccgaagttgcataggttcgtgtttcggggttgtagttggtcggtactcggatgattcggccgcgcatcagcgcgccaactttggcgatatccccgccaaatgtctgagcgtcgtactcgaggcagccgacagccgtgagtggaaattcctgatcgctgtcgacaacctcggcaatggccttgacgatcatctgatcgacgaccaagtcggaattagcgttcggcgtcaggcgacgcacgcgaatagtccaacggctaccggccggcaactcaatacggtgggcgcgctcgtactcagtgatgttcttgcgatcaacagccgacaccagcacctcaacgtaggggccgttgtcggtggaaatatccacggcgtaatcgatccgcacgccgttgatgttgccggatgcgtcctggctgcgaagggttggccaactcaggcgaatgcgaacagcgtcgatcatcgagttggttatgctgtgcaaccacggcgtgccgaacaccagctctttcttgacgtcgatctcgttactggattcttgtatgccctcgaggcgcgcttgattcagctcgccattgcggaactgccacttggcgcttgggtagttgatcgtgccgtccggcgcctgaattgcagtgccgttcagcttgatcgagcgcaaaccatcaaccggcccaacgataggcccccagctccacaggtaggtaattcgcgcggtagagatagacggaacgctgttcgaggcgatgctgggctgcttctgcttcgcttcaccacccttgctgccgatcaccgcacgacgcttacgaggcgcagcgcggcgcgccttctttgctactgcgctcatgcgccctccagaatgcaaaaacccgccgaagcgggttggttgtattggttgaatcagttgttgtcttgggtgtagatcccgcccgactcgacagcgcccccgatctcccgctctccgtacagcagcgggtaagggttgccctgggcgatggtcgtgaccgcgccgccgaagccgtagctcgggttgttaccgtcgtcgttcttgccctcggcactggccttggtggttggtgacagcatttgcaccaccccgcccaggccaacagcagcgccggcggcgagcagccccataccgagagtcgaggtggtgccgccggtgaacaatccggccacgatcagcaccacgccgagaagcgtctgaaacatacccgcctgtttgctgccctgaacaattggctggatgcggatatcgccctcaaggcgccccaccacctcgagctcctgctcgctgacgtttcgctcatcaacgaacaccgcaaagaccaggccgcgctcatgggcggtacgcatgaacttctcaaagccaggcttcatcgcgcacaacgccgaagtggcgtcgtgaatgccgtgcagatcaagccggtactccttcccaaacttcttgcccagcaccccgccgagcttgatggtgcgcatggtcatggccggtagtccttgtgccggaggatcagcttcacccggttggccatcgaccacccgtagatttcacgggcagccaggcgaccgggcatgtggtggtaaatgaatgggcctgatccgccgagctttggcgctggctcactggtgagcgcgggctcatcgcccaggtagatcgcggcgtgattcgggaagtagcactcccggcccggggtcgggatctgcaagaccagcatgtcaccgcggcgggcctcactgacctgatagaagcctgtggccgcgaagttgtcttcgtagaggctcgggccgtctttctgctcccaccagagatcggagcgctcgaagttcggcaactgcaggtcggcctcgcgcgcgaaccagtcgcggcatgcggcccagcagtccagaaggccatgggagaagtcgcgacccagcagaggcgcctggaagcgcgtcggcttgaaccattcaaagtcaccaccgggccagccaacaatgccccagggcaattcgtgcaactcgcaactgacgcggtcggccatgctcggcgtcggcgccttgtcggggtggctgtgaataatcgccagcacttcgcctcgatcttccgcctgggccatgtccttgtgatcgatctggaagtgttcgcgcggcgtggtggccaggttgccgcagggcacgtactcacggccggaagcggacttgatcagcacaccgcaggcctcggccggataggcgcgttcggcatgagcgcggatctcgtcctgcaatttttgattgatgcgcatcgctacctcgaacttgctatcaggctcgcgcccatggatccaccaaaccggcgggtgttgccccgaagcttgcagctgctccaccagccgccgcagcggtccagcgcggggttgtcggtgggctgattcttcttgtcgaacatcgccgtgcctgtataggcgcaggcctcttgccggtacccgccacggcaggcccaccggcaaagcttggtgatctgctgcgacggcagcatctgcccttccatgtccgtagggctggacaacgagaacgtgaccgagatgctgggcagcgcctcggtcttctgctcgataaaccagaggttcgtcttcgcctggtcactggcgtcagggttgccgtcggggaagttggcggcgtccaggaagtggcggaacgtttcaatcaccttgacccgggcgccggccaagtcgcggaactggaagcaaagggcagtgatcgccccgcgcacgccgccaagctcgtcgtccacctgcaacgtcggagaagccgggcgcccatccccacggatgtcgaaacccttggcctcaatctggagcggcgaatacagccgcccctgccagatgatgtcgccctcatgggcatggccgtgaaagcgccatatcgttgcacccagccgcgtagcgtccagctcgtacagccggatctggttacccggctcaagcttttgaatatcggtgttgtaattcatagggccccagaaacaagaaaccccgcacttggcggggtctggtgaggtttaaggtcgggggttgaatacctgcttcacggtaaacgtgacggtgtagatgttcatgccgagggctttcttcttgtacccattggccctgtaccagccttggtgctcgccgggcggcgcatagcgaaaggccttgtagccttcgtgccgatccaggaacgcaagcaactcgggtagctcctcgcctggcagatcctcaccggtgtgcaccaggttccagacctgactcttggtgttgataccaatgcccccggcctggaccatgccgtcaccgaactcgttttcccatgttctctggctgatatcaccgtcagggccgacctcaacatcaaacgtaaacgtctcagccatcaacgcctccacagccggccaccctggcccatttcacgatcaaggaatttaccgaactgcgtctccagcccggaagacatcgcctgtccttggcgtgccgcttcctgatctgtcatgccgggctgggcctgtacggtgattggtgcattgaagacaatctgtgtaggggcgcttggcgctgactgggcgctagaccctaccattgcagcgcgtccgtccccagctgactccaagctaccgacgccgatctgtgcatacggctgctcactacccagccccctgtcgatcctcgacagaacagcgtcaagcttggcgctcgtttgagcagtagttacccgctcgccctcttgcaggaaccaggtgccatcctttggaactgcgtcgatgccgtcatgcgccatacccgccagcgcagtcataccgacggccgaagccagcggccctgtaacagccatggccgtagccatcgcagcaggcgccgctgctggacctatgattgggatcgctgccgtggatgcgtaagcattgagcccagcggtcagagacatagctgaagcgttcgcgcccaatgcaccggcggcactcgcctgggtagttttacccaccagcatctgcacgccctggtaaatcagccactgagcagccatgtcacccagcgccttgagcatcgacttggcgaagttgccaatcatgtcacccagggcgtcatcggcatcttcggcgccgctggcaacatccgagaaaaaagtaccaagaccgctggtgccttcttgcagcgctgtgttggtgaggtctgctgcctgggccgaatagtcccgcgccgcatcggcatagttggcccatgcttcgttgacgccattcatccagttggtttgctgctcatccgtggcgtcgtagaaatcctgctgagcctgtaggcgcttatcgagctcagcctgcaagaccgcagtttcgttctggtacagctccggggtgatctcgccgctgttgcgctgcttaaccagctcgttgacgtcggcggcgtacttctgccgcatcgctaggtcagcccgcatccggtcgcgcgccttgtcgcccatccccacgcccgccagttcctgctcaaacccgtccttcgtggtttgggtggtcagcgcctgggcgttcttgaacgccgtcagctttaggtcgtcctcgttggccttcttcagcttgttcagcgcatccagttcggcggccatgccctggagctttttcttttgcgcctcgctaagcttgccgagcttgccctcctgaagctcgaaggaaagcttcatcacttccgttgcttcgttttgcctgttgccggtggtgttgatcagttcgatctggcgcttgtagccttcctctgccgtgtcaaacgacttgagctgttgcttagcggctgactgcccttcggtggtgttcttgcgggcggccttggtagcggcgtcgtcagatgctttctgagcgtcttttgctgcggcggcggaacggatcgcaacaaccatttccttagttaggagggcgttctcggcgatgtacctatttgccgcttccaggctggtcttgtcttgtgctgtagccaactgcttcagcagctgatccagatacttttgcccctcctgtgcagccttagccttagcggcggcattctccagttccgcacgggtgttctcatcagtttggccagtaagccgagcaagaatttcacgttgcgcatcaagcgccgcactcaaatcggtaacggggccctggctattcctgatggaatcagtcatcgacgtcatgacgccaggaacaagtcgaacttgctctaccactgccagccaatcaacaacaatccctgcggcctgatccttagaagccttgcgcaccaaatctagcgcaccttggacatccgatggcagcggcgccagaccagccatcagtccgtcagcaccagccccacccatatttcgtagatcattttcaaatttgtcggcaatcgcctcggacatctgcccgaggtcggattgcatgtcctcgaccttcgacttgagctggtcgagagtgacagactgagttgcccggttcagcttcccaaaccgctcgatcaatttatcaatcgggtctccgagatcccccagctttttctcaagaacgctggtgttatcgcgcaatgtgatgaaggcggtcgccgcgccgatggctagtgctgcgactcccaaaggcccacccagaagaccgagcaagccaccgccgactcggcccagagccgcctgggctgccgaaacagcgctggtcgccctcgcctctgccatcctcgcttccgcgagctgaagagacatctgagtttgcacggcggtaccgcgcgccgctgtcgcctctttctgggcaaggaatacagtcgtttgcgctttttgctgctcagcttgagcggcaagaagtacagcggttgcctgggctttgcgagcagcgacatccttgtacgcggagtaagttgctacagccgcagagtttgccgaggtgacgccatacttcgtcagggcggtgattgctgcgaaaagggctatgtcggccaaggtcgaaaaattatcgcccagtacggcaatcccacttcccaacttgcctgtaaagtcggtcgcctcattcaaatgcccgacgtaaacgctgaatgcattggacagattctgaaccgcatcgcgaaccgcaacgctcatcccgtcagccagctcgccattagccttggcagacttctggaggcccgtggtcaaaatatccaggctgagcttgccctgcgcgcccagactgcggatttcttcagcagttttgcccgtcgacctggcaatggtatcaacaaccgttggcattgctgctaggatcgattgccaaccgtcagcctctaccttgccggtctgaagcgctttagagtaagcatcgatagccgtactagccttctctgccgatgccgagttcgtcaccagcagaaagctgaagctatccataacatccagcgccttgctggtgttgtaacccatcgacttcaggctgcccgaagtgcgaatgtagagttcctgagcctcggcaagtggacggtaggtgcgcttggcggtattgagcaggcgctcctgtacgttgttgtactccgcgacactgctagtcgccataccgatacggtcagacatctggccgtacgagtcggcggtctcgatgatctttccaatagacgcagcaccaatggcagcggcaagcgcactcttgattaatccggatgcgtgcgccgcgcgttcacctacccgatcaaaagcggtatcgacacggcctaggctcttgtcgatcttgctagatgcctgcccaacgctggaatctgcccgggccatttcctggcgcaactgcgccgtggtggcctcaatgcgaacaagcattccctgtacgtcggtatccgccatgcttttctccagacaataaaaaacccgctcaaggcgggttcgttggggatgttattgactacctgagctcgatctcagccctgtaatcgctgacgcgcgctttgaaagccagcgcctccttgctttcgttgagatccttaccccacatggctgaacttaggtaagtgaggtaggcggcatatagagattttatacgctccctcaccgcatcaccctctgggtacttcgcatactccgcttttaccagcgccttaaccttgtccttactactggccgcacagctgttggcctcgtcgagtaggggctgtctcttgggaccttttgtagcatccgcaagctggaagttgagcccgcaaaggtaaacccctgcccccatctccgtctcgatcggcgccactttttcttcttgggcaaatgcgtggccggctaggaaaaagagcattcctgcagatatcagtgcttttctcattctgtcatcccgtgacgtaaatgcgcgagagtaacaaaatacgcaagaaggcaatcaaccactatttgcctgacgcccagtgagcgcctgtcgcaacttatcagccacagtcgaagcggatggcttatcagccttggctttcgcctttccaccgccgaagggattggtcatctgcgcccattcgattttggcgtccatggccaggaacagttcagggataggcgtggcccaggccagttcaggagaccagcccaaccagccggtggctaccgcgtatagccggtcgacgtagctgccgttctcgacagcacttacgccgccgccggcttttcctttcccgcgtcagggcccttggggttgtacagcgccaccaggtaggcattgagctgcacggagacatcaaggacgccggcctgccaaacctgctctgcaacggcctcggcggctttgccggtcagcccggcaccgccggcgatgatcacagcgcagccgtcgacgctcagcgcgttgattgcctgggacgcgccgcgcagcccgccgaagtgggcctcaatggcccgcaccgcgccaagcgtaggcttaagggtgtaggtctcaccgtcgagcttgatgtcgacggtgccgaaaagggtcttgctcatgcgtcgaatccttggggttcggggccgaagcccctcgggttaagccgcggcagccgggagaatttccaggatgtcggagttgatgccgatcgtgacgttgcggcgtaccacgttgtcagcggcgccggcggcgacggtgttgttcatcactttgccacgcagatagaaggtggtcggcagcagcgccggggtggcatcaggatcgccgtcgttgagggtgatcttgatgttgtagtcgcccttgctgcgatccttgtgagcgatcttcagcttggcctggcccaggtcaccgttatccaggccgacggccaaggtcaggtcaccggcatcggcggtgcccttgtacttgcgtacacggccatcgcgcagcgaggtgaaggtcacagagctgaacgtgtcaccgaactcgcccaggtcttccacctcgccgatatcgacataggtgtcagccttgtagagcgcttcagtgtccgcgccgttcttgctgccgatgccgatccggcagccggcggctgtgttgaggttgtcttcggccatgggggttcctccaagggcacattggataaagccgcggtgcggccgggtgttgggtttagtgggtggtgatgatgcggaccgtgatcgatccttggtacgtgacgccgtcagcatcgcgctgggcgtcggcctgctcgacccggaccgacactgcccggccaacgtccaacggcaaccggcgctcatccagggccgccacaacctcgccgaggatgcgcttcacctcggcctggccatgagcgtccgaccagaccgacaggtagatcaggcgctgctgacgtttcctgccggcaatgggcgagatgttggtggacaactctcggtcaatcgagacatagggcatggccgtgtccatcggcgcaccatcgtagatggggcacgacacttcggcctccagcctggcgaacagcgcctcctgaagcgcaacagacggatcagccattggaaagccccttgctcgccttgctcagcgttcgatcgatggcggccttgatgctggccacgacatactcccgattcacgtctttcgctgggcgaagccatggatgcgcaggacgcgccggaatgtcagggtacttgccgaagaagtgcgtaccatcagccttgttcgtcgaccggcgggtacgaccgccagcgcgcttgttaccggtgtagcccttcgtcccgtactcgacaaaccgcaagtagaagaaccgttgtttattcttcttgccgcgaataccgatctgggcatccaggccgctttgagaaacgaaaatagtaagcgctgcagcagcggcgccagtgtctttcgggatcagctccttcatcgtcgaaagaatccgctcagcgctgtcacgcatcaccggcgccagctcgttatccatggactggtggatgttgcgaagcgtccggcgcagcttgaagtcacccgacatgcgcgagcggcgactggccatggcctactccttggcctttccggccttttcagaggccggcggcgagtcgggcgcaggctcgaccaagccacgctcgactaggtcagcaccaagcttggcatccaccgtgaattcttcacccttctcccggtcgccggtagcgccggaaagagtgccaagagcaactaccttcatgattcacctctacggattgggtacgtttgaacagagcaatcgaagcatgtcgcgctcgttgttcggcagcgcggcttcgatcaggtaagtggtggcgattccattcgcctggtagaccaggcgattgcctgcgatcgcatcagggcggggatgcatgcgaatctctgctgttaccaccgctttcagttgctcggccacgggcgatacccgccccgtcggcaatgtaatctccgaccagagcttgcccacttcgacccaggcgatatcgaaaccgcctgttttgttcttggtgagcactggcttgaacatcgtgccccggtggcgcagcggtccggccctcatacattcacccagcggtgaggcttccacagagcatttgttgccattggcagttccgcagtgatcgttccgaccaccaccgtctcgcggctgctgtaccagtgcccgatcagcaaaagcgctccttgcttaatcgccttggtcatcagcagtgcattgccgaccggatcaggcaaagccgtctcgggatcgactagcgtgcgattggtccaggtctcaaacgcgctgagggctgcatccgtgtagccctgaatcagcgcattctcgtcgtcatggtcgacccgtaagtgagccttgacgatggggagatcaatcaaccttcggcaccaacgcctgaagggcttctttgttggcggacggatcgaagtcgatccctttgccagtgagccaggccttcagatcgggaaccttcatcttgagcggatcggtttctctctgcgcctcgatcgccgcgtcgacttcttcctgcgagctgcgcgacgcataaccctctggcgggtaattcaccgccaggtagccggcctcaacaaactcagcaatggttggaccatccagcctcagaccattggcgtccagttgattggggtaagacgccacgcccaggtgctcgaccgccacgagcgcgcaacgctccgaaacatcctgctcgccagcaggaacctcaaccacatggttgccgtccgcagagaatgggaatggcttttttacaataatgatcggcataaatcctccagcaggctgggcgcccgtaggcgcccgcccatttaggcagcggcgctcagggtgagaatcttcacggcctgggagtcgaccagcatgccgccgacgcgcttggtggtgtagaagccaacgaatggcttgttggtgtaggggtcgcgcagcacgcgggtgccgatacggtccaccacggtgtaggcgcgcttgaagtcaccgaatgcaatggcattggcatcggcggcgacatccggcatgtcttcgttttcggtgatgccgtaccccagcaggaccgaaggtgcgcccgcttccaggccagggcgccacaggtagttgccctcgctgtccttcagcttgcggacgtaggcaacagtcaggttgcccatcatccaggtgccattggcgcgatagccagccttgagggcgtgaatcaggttgatcaggctgtcaccagtaatcgcaccggcggtgccgctcaagagcttttgcaggacgccgaaggcgcgagcgtcgtcgtctttcacgtccagaccataagccagcagacctttcggcttgttgacgccatcgcctttcaggaaagcattgccttccttctcagcgaagtcgcgagcaacctcgccattcaaccagccctcggcatcgaagaagatgtcgtcaaggctggtctgagtggcttgtgggttggcgtacagttcacccataaacgcagagatgttgcccagttttggagtgttggttgccggacgagcatcggtttcacccacccagcccgcgccgttaccgccgaggttcaccagacgcttgtagtccggactgccaacggtgatctggttgcagacctggcgcataggcgaggtgtcgcgcagcagttcgatgatgctgcggtcaagctcttcgggcactgcgaagccgccatctgcatcaacgccaacctgcaatgccttggcctgcagctcgccaagaccggtctcgatacccttgcgcacgaactgcatgaatgcggtcttatgctcactggcggccttggtgccggtaccgtcaggacgcttgagggacagcaactctttttccaggttgctcttcaactcatccagctcactcagcttttcgttgagcgtatcgacctggccggacagcttgcccttttcttcttccaggccatcaatgcgcttgtcattggtctttttaaattcgtcgaacttcttgcccaaggcttcggcgacgtcatcgatatctttcttttcaacagccatgagaggctccttaaatgcgggtcaaaagtgatttgagggattgcattgcgtcgtcggcatccgcctctcgcggtgaaactgcgccgtagcctttggccataaaagccttggcttgggagccagaaaacccaacctctcgaagggctcgctccactttgctgggcggcggtgtttcgccgcgggccagcagagatttcacatcagttatccgggcctcgtcgttggccgggaaggtgaccagagagagctcccaaaggtcgattgccttcagaatccaaacgcccttctccttgtcatactcgtagtcatcgagcatgtagccgatggaggtgccggtcaggctgcctgccttcatgtgcgcatgggcacgcttggcaagcggatcgtcctcgataagtaggcgccctttgaagaacagccccacatcgtcttcacgcatctccgtgtagatgccgatcggctcgttcatgttgtgctgccagagcatggccgggaggcgacccttctctttccacttggccagactggctgtgaatgccccgcgaacaaccacgtcgccgtagctgtcctcgactccaaacacagagccatagccctcgaactcgccgctttcgctaaccgatttaatggtcagcggtcggtcaagacgctgttttgtctgcatcgtcggcagcctctggattggtggtcatgttcattggggtgaggtagatatcgccgccttcgcgggggttttcgtcttcaagttcgcggcagtcgttggggctcaaaatcccccactggatgccctttccgtaggattcgtaccggcctttaaggtcaccgcgcatcagtgcgccggcgttgaactttgcgtagtgagtaaggcgatctttctcgttgagcagcccaacctgaatgcggtgctcgatgcgagtcatgatcggaaccagcgagtagttcacgaagctcatgcccatgtgctcaatgttgttgagcgtcatcttttccatgctggccaccaggtgtggcggcacgcggaacaaaccgcatatctgggactcggtcagctttttggattcgatgaactgggtgtcttgggcgttcaggctgatcggtttccagtccaggcccatctccagaatcatgggtttgtaggcattggccacgcccatgtgttcgccttgaaactccgtcttgagccggccaaaggcttcgtcggtaagctgctgctcagtccgcaaaacaccgctagtcacagcgccattcgtaaaaagcttggcggcgtgagcgtccatcgcctggcccagacccagcgcctggcgagcgtaagcaatggggtttagcccgttgagcccgtccagcgtgaacaaccgcacatgccatatttcatcctgggttagcgttttcgtacccgatttgaaattgacggtgtactcaactgtccagtcgtccttgagctttggcgtgacgatgtccgggttgagcggtagcagctcaaccacattgcccaaagccttcaccttgtaggcaaagaagttgccacgaagacataggcacgccaccagcatttcccagaactcctgggcggtcatgtagctgttgggggccatggaaatcagcggatagagccggtgagccgtcgccggcagtcggacccgaccggtttgctttagcagccggcaaggcagcattcccatcgactcggccagcacccgcacgcagttgaatacaaccaattgctgcatggcgctggtggtggtcacgcgctggccggcattgctctcgtagcctgcgcccaatgcctgggccagcttctccggcgtatcaatgatctgggtgccacctttcctaccaaggagtgcgcgtagcatcagcggccacctcgtacaatcgagtacacggacagggtgaccagcaacgctccgcagacggttaacgcgagtggctcacccatccatgcccaaaggccgcgcgtcagcaaagccaaaccaaggacgccgacgagatcggggaaagcctctttcagcgcctccagctttggcgacttgatttcgtcggtcatagggttcgaattccgtgtttagtgatgtggtcagagagggtgtcatcggggtgaaggtttgccagaactcgaccgatagtcatgatcaacgccaccgcaccgtcgattttgttgtcgtctccctgcttgatcgggcgcacaacatcgtcgttgcctggcaagtttttgccgatcacgtttgcgatgcaccaggtcatgattggattgccgtcgtggtggaaccggccagcctcaatagcagcctccaattccttcatcgggtcggacatgttggtgtagttttgcgtgatggtgaccggctcaaaaccttcgtcatcaaggtcatggctgagacctgtcgccccatgtggatcaatagggcactcgcgaatcggggctaggtggttcgcttccttggtgtcctcaaggatctcgcgatagtcgacctcggcaccgtcagtcacagccagatgctttgagtgaatccacgcctgaaaccgctcggacatcctcttgttatcggtatcgaatgcggtgtcgtacggaacccaaaacttcggcgcaacgctgtagtagtggaccttgccatcgataacgcgccagaacagcctggccctcgagttcatgtcgagcttgcgtgccaggtcgaaaccagcgatccattcttgtccctcgaactgctctagggtcagcgaggtgtcttcgcaggccttccagctttccatgttgaagaagccggacttcgcgctcacccagaggttgaggtgcttcgtcttgaaggtgttggtgaatcgggccgagcgaattgcacgggcttgctgactctccagatactcctggaacaccgagaccccatggttcgggttagccttggccaacatcttcggatcggtccagtcatcgccctcatccagcgtccagatccatccgaaaagttcctcgtcaggcacggtgccttcgagcatctcgatcacctggcggcgcttgtcgtagcacggaccctcgatgtcggccccggcggtggtgatgatgaacatcagcggttgccggcgggcgcccatgcccgtgagcatggtgtcgtactgtgccgacgtagggtgttcgtggtattcgtcgacgatagcgcagctcggtgaagcgccgtcgccggggttgccgatcagcggctcgaagcggctgaagtccgacgggatattcatgttcgaggcgttcacctcaatcccagcagcctgcaccagcatcggcgacttggtgaccatcagcttcgccggcctgaacacttcccaggcttgcttctcggtggtcgcgcccgagtaaacctcggcgccgaactcaccgtcagccacgaacatgctgatgcccactccaccggcaacaacggacttgccattcttgcgaggcacttcccagtagctttcgcggaaccggcggtggccacctttcttcttgacccaaccgaacgtcaccgctaggccgaacaactgccagccctcaagggtaatgagctgtctcttgaaagcccactctccctttgtgtggggaagaagctgaattagcttcagctttttctcagcttttgccgggtcaaacttgaagcgaaacccacgcttccgacttgccgccacgtcatcaaagtggcgctgcacggcctggtgaatgtagcggcaggccggaaccttcccgcggagaacggagcgcccccaggccattgccttgtcgacattggcgtgcaggggtttggtcattaggaactcagtagttgagcgaactcattggttgaggttttcttgttaccgccgatgatccgcgtccggctcgccggatcgaggccgagcagtgagccgaaggtgaccaattggcgcatcgattcgttcgccgcagtaagtgcggggttcttcatagggctgccctgggcagactccacgacgatcccgaatttctggacagcctcttcggacatgcgccacttgtcataggcggaacagaacgcctcaacgttgtgcaaatcggtaagcgcaacaactttttcgcggagtaattcaggaatgagcatcttccacatggtggcggctcgctcgctaagccagtccggcgggtcgatgtttgtgacggcggtgaactggggctcatcatgattgagtgcccgctttccggggttcccagcaagttttttctgggccgtcggcttgggtttgcgaccacggccggcgaccgtggcggtgcctcccatcgcgcaactcctgaatttttaatttcgcgggtgtaagagaaaggccaaggggacggtctagctcacaaaaactccgaactttttaccctccccctcccttattgagaatcaacatcattaaggcagtgttttcggtcatttcgcagcatttctcgctgggttgccccagccgccatcctccgctgccgtcttccggctgtggcaagggtggcacaagggctgccagttcgagctatcccagaagatcgcccagtcacccttgtgtggccggatgtggtcgacgtggtttgcagctacgaccagccctttccgctcgcactctacgcacaagggatactttgccaagtacgccttgcgggcctgctgccacttgtagctgtacccacgctgagcactggtctctcgttgccgctcgcggcgcttggcctcatcactcttgccgatgtccacatggtcatcgcagtagcgcgggttgcgggtcagcacattgcagccctgggcgttgcatggcttcttaggcctgagcggcatactcagggcgtcctggttggtagcttgaagtcggtgacccggtcagctatcgaccggattttctcaacgcccaggaagccgacccatccacctacgaaggtagccatgctctgcggcagcccgaagaactccaggccgctgatgatggtcagggtcaacccgccacacagcacgccttccacgatcatctggcgacgcgagccaccaccataggtaatgcgcaacacagccatggcgaaggacagcccggccgggtaaaggatcggcgcatgctggctcagccacgcaagcatcaatgcccaggtgtctggcttatctggcatgttcggcatctcaggttcctccctcttggggagctatgaatagaagagcccgctcatggcgagcagtgactgcgtgctatcgtctacacgcactctttaactacaaggacgaaacaatgaaaactaggctgcaacagactgacgctttccaagccagaaccgaaaccggcaaggtttacggcataaccgagttcacagaacagatgtatcaggaattccttaacgacgcagataacggctgggtcgacggaatgaaagaatatcgagtgtcgggtggcggccacgcgaacaagaagagcgtcacggagtacgaaatcgtagccaccggtgagatggcgactcgtatctgatctatcactccagaaacaaaaagccccgcacaatggcggggctttttttgttgctggtcgaatctcataacgcgcaagatcgacatgatggggttaatttacggccagtcggccaatgggtcaagcggcatctacaaagatttgttcactgtcgaagatctcggtcgcgtggatgacggcctgctcttcgagcttctccaaacgcttgtggattccgcctctccagttacggcgcgtgcgctccggggatccagccagatcccaggtgttcatgtcgtagaactcagcaggcaacacgatcatgtcggtggagcgcttgccaacctgaacgcccttcagcttcggtatcgcccaggccgtcagcgccttatagatgaacaactgcggcgccggcgaaaccatgcgggcaacgagcctaccgatggcaccgaccttattggccttgtgagtcgagtacttggccaccagcacatcccactgagccggctcaagctgccggtgcagcagcgcatagaggcagcagtcgtaatcgaacttgtcgcgcactgacaacgtgctgccggtgccgccctggcgaaggtcggcatcaatcagcttctgccatgactgcttggtgctgttgtcgatgttgtctgctgccagcacccgcaccagggtgcccatcacgtccttatacatagccatggcttatccctctgcctgtgcgttgatgacgcgacgaccggggcgtgccaacaccatgtcctggcacgcatggatcgccctgcaaaactcgtcgcgctccatcggatgttcggttgggagctttaggtactcgttccacacgccggcaagaaggccagcgataaaggcttcgcggtcagtcaatacgatcggcatgtcagtcccctgtgaagttggtggcacctgggccacggcggttgttctcgttgtattgcgcttcagcgccggcaggcttgaagcagttgaactgtgcgatctgttgctcggcggcctggagtcggatgctcagttgcgtcaccagcacctccagcggcagcgcttcaccagtttcggcggtgacccagcccgatgcgttgcactgcacgcaggccagctcatggaagacacccttgatcacggcacgaccacggcatgccgggcacttggccaggtcgagctgctgagccttgaccatcaacgcctctcccttgctttcagcatctcgtcagcaaaccggtatgccgcatcggagtactcggtcatgccctggaagttatgacgcttgccctcgccgtcggtatacccccacccaccagcgatcaccatggagttcagggcactgatggcgatctcatcgcgaagccggacgaggtcaccatgagtgccgaaggcaggagcagctattggttttcccatttttaaacctcgcccttaacaaattgtggttctggctcgcaggccccgccgttcaaggcgtctacgaggttttgcgaatcttcatatctaacgcctgtctgctcgtgaatcacgttgaagccacgctcatctaaccagttgtgccacctcaccaatgccaggcggcgctgctctttggcctgggtgttgatgtaggtggaggcgatcttgcccagtgagtggttcagcagcatctcgccaatgtggccgtcgacgccgaggtcagtccaggcggtgcgagccaccttgcgcaagtcgtgactggtccaggcgccctgccctaaccgggtgaatacggcgctcgcctggttgtcgctcagcggcttgccacgacgagacggaaacaagaaggcccctgcatagccctgggcggtctggcggtcacggtaacgacgcagcagcgcggcaacctggtcagtcactggaacgcgcagctcggtcttggtcttggtgtgttcggctggcaggaaccactcgcgctctgtcagcgcaatgtcagcccaacgcgcctgacgggtctcgccgatccgggtgccgtggcacagcatcatcaaggccagcatggcgtcagccggtgcgctgtcgaagcgctcggccagcagtgccaccaactcaggcacctgaacatcgcgcaggcgtgcgaccttcggctgaatgcgcgcggtggtgaagtggctgaacttgagctcggccatcggattgaacgggatcatgtccaacttgcgggcctggcgaaaggccgtggcgaccaggcgaaacagctgctgaacgtaggacagcgacagttcttcctgcgccggccacatcagcagtttgtcgagggtctgggcattcaggtcgccgatcggcaactcatccaggcgtggtttgagctgacagctgaccgccgatttgatcgccttccggcgcttgtcggagagcgcgcgcgacttggccatgcgctcgccgaaccagtccagcaactcccccacagtcacccaaccggaaacgctggccgcaccgtcagcagcaacgcgcaggcgcaccgccggcagcgcggcgaccacctgcttgctgctcaggtcggggaagtggccgataaggtgccattggcgcttgtggagcaagtaccaggagccgcgcgcgcggttcttcgcgaaccggaaatgcagcgccgggtgactggcgtcccgcaagtcgcgcacatgctcaagcttggcattgcgtgcaatctcggcatccgacagtttcaccgtcaaggtttggatctggggtttcaatgggcgccctcctgagcagcaagccggtctatgacctggtacgtctctggccacatccatgcaccgtaacggcgggccatagcctcatccacgaacagagccaaggcatgatcaggcaagtcgcccaagtcaagtttgaaagagcagcagaacactgcaaaacgatacaaatcaggattaggagtcgccatagagcgctcagccacgggagcctcctgcaagacgagcacgcaactcagcgatagcgccattcccgacctctggcgtgattcggccatcgaccttggcaggcagtgccttgggcattgcctgcagcggcaagccgtcgagcaagcggcgaatggttatcgtgtaattccggtcgaacagcttcaggctcagcgcggcgtctagcttattcagactctcgaacccgcattccttggcggtgtgccagaccgcgtcgtgcgaccacttgccctgcccagccatgcctggatgggcgttccgcacggcttcgcggtgagcaactgccaaaggcggaaggccgagcatttcgggcgtaggcttgcaccactcgatgaactgccccgggctcgggatgaagtcggacacttgcttgcgggccttgaccatgccgaactcgatctgaccctgggtgcaaattccctcatcgaggaacgcctgcatccactgcacctttgcagcctggtacgtctccttgtccggccaagcttgccgccaggccgagcggatcaggcgcaactccttgaacagttcattgatggcgaaagccatctggcggcgaccttcgtcagtcggggctgcgctctcgtccgctgcaataaattcgcccgccttcgggttggcccacaggtcattcgcaatcactgatacttgcttcatcacgattgcaccccgttctgccattcggtgtcgtcatcatcgaagtccgatgccggggactgtttttgccgaatcggcgtcacgttggtggcggctgcacggaccttgtcgttattcacccacttgaccagcatgctcacccactcagcctgggtgttgacctgatgctgtggctcgtagtgagcagtgaaggctacgcgaacttcctcagtgaaaagggtgatcgccaggccacgatgaaaggcataggtcttcaaaagcttttcgtcaggcacccagtcgagggtcatttcgctgggcatccgagggtcgactggctcgttcgcagagagagggttttgatcttctcttctcttctcttctttaggtaacgcatcgctaacgctcgaagcgttacttttgccgttactcgctttgtggtttgccacccgctttgcggtgagaagcctgtttttagcggtcttcccgttatggcggtcgaagtgcgggaggctgataacgccatcgatctcgatcatccaagcaaccgacttcatgtgttcgcagaacccggtaacaccgacaagacgatcaagtaactttttgctaacgctcggagcgttacctttttcggtttgctgatcgaaccatccccacacgcgcatcagcttgccgacgacggcgtcaggatcgatatctgcgaggtcggcgatctggcaaacctccggcttgtccagggtggtgagttcgaatttgatccagtcgccggccattacaaagcctcctgaaggactgttgcgagatgggtgatgcctttgcgcgtgaccatgacctgctccaccaccttcaagtcttcctcggcgcccttccctaccgtgaccagcttgtgctcgagcaggcccgaggtcagtcgaggctggtaggccgaccaagcggcgaaggaagtgcggcggtagatccagcggttgtcgctgagccacctgaagagcttcagcgggccgatgccaagttgtttggcggcggatgtgatacagatcgagccttgggtggcggataggcgttcaagcgcttgaaccttcggcgcctgctgctcaatgacctggtgcagagaagcattctgcttggcctgatcggcggcgagctggagggcttcggcgaaattggtaggcatcgacagggtgtgtcgcgacaccttttcaagctccccgagacgtgtcacgacacgatgacgaagtggaatgctgtaaccggtcagaagcgtctcggtgagtaggcggtcaaggaggaattcggcggtgtaacccctcccgtccttctgttcctgaagatggcgcaaatctgcgccatccttgaacagagcctcgcgcatcacccggatatcacgaatgacgtccttgtgctgtttgccggtgagatcggcgatctcccgactcgacatgctgaccgtattgcttggagcaacaagtgtgttcataatggccccacatagttttattgctgttgaaagagccgccctgccaggcggtttttttatgcgtgcgatttgggtactggatgaatcaacagctaatccaaatcactttttacccactcgtaatgagcggaaaatcacatctcacagggggctaagcggccgacttgttcgggtgtgcttctgaaagcagccaagccgtgtcgaacggcttccctctcgcggtcgccaattcacaaatcttcttggcgtatctcgtctcgccggtgtattcggtgcgaggcaaagcatcggcagccagccacttgtaaactgcgcgcggagtcttgccgcaggcctgagccaccgtcggaacaccgccagcgtcgtcgatcgttttcttgagcggccgcatgtggcctccgattcaaatatgaacttacggtacatcttaagtcggaactgaaagtacatgcaagctcgtgagaatatgaacccatggttcaaatagatgaaattcggttcgcttttatctctcgactcaagaaagccctggctgcagctgggatacctgagtggggtgccggtgttcgtctcgcgaaaatcgcgaaggtcacccccaaggcttgcagcaagtggctcaatggcgagtcaatgccaggcggagcgaagatgctcgcgcttgcaaacgcgctgtcagtccgcgtcgagtggcttgagtacggccggggcgaaatgcgcgaggcagcatcagctcctgctgatgatcgcgtccccccaagaggatttgatctcgccgacgacaagaactacaccggcgttctccagctgactgctcgcggatcaacgggcgatggcgaagacaattcgcacgtcgagatccgcggcgtgatggccttcaaaacagaatggctgcgcgcaaacaacctcaaccagcgccacctcgacgtgatttacgccaacggccacagcatggaaccgaccatcaatgatggcgacgtgctgctgatcgatgagttgaaaattgaaccgaaggacggccagatcttcgccctgcagagcgagtcgaaaggcacgatcgtgaagcgcctggtgaagtcagacttcgatggttggatcattcgcagcgacaacccagacaaggcgcgctatggcgacgagacgctgcgtgacggggagataaacgaggttcgcatcatcgggcgcgtagtttggcgtggcgggatgctgtagggcaatcatgcgacatggcataagaccaacataaaaggagctatactggtatgagtgacaagccaaaaaacacgcctgcaccaaaacctgcacaaccacctagcaggcccgttcacaccaatgatggttggggtaaaagcgatcgtggcagtggcccgaacaccatatcggagagccgtcctgttccgcgcccgcctagagggaactgaagatggaagatgccgataagcttagaactgagcttcatgagctcagtttttacgtacagcgcaacatccgatatcacatgcgaagaggggctttttttcttcgttggggtcggttcactgcatttatcggcattatctttggctcagctgcagtaacatctttgcttgccggagcgagcccgtacgtgacgggcgctgcagcgcttttggttacggcggcgtctgctattgatttggtggtaggcaccggtcagcgagcgtggctgcataacgacttgcgaaagcgttacctggacattgaggccgagatgtttttggacgagccctcatctcaggctggcaagattaaagcgtacaaaagccgtattcggcggattgaggctgatgagccgccgacactctcggccctcgaaattctcgccagaaacgatgtaattcgagccatgtatcccaaagaagaggcggataagagtgtcagccagcttgggtggctcaagcgcttaactgctcaatggttcgactgggacacttctagcgcctagatgaccacgcgcagctccaaataagcccggcccagcgccgggcttcttgtttctgccctccccgatctggattcatagcccgccactgagcgggctttttattgcctctgaataaattatgtacttttggtacttgaccaatatgaaccattggtacatatttgctccatcgccggataacaaccggccagatggaaggcagcgatgaaccggcctcaacggttcagagggttggcaactgacccgggcgtgcagcgtaaagcgccaagaacagttatccagcgggagaacaagccgaaaggcccgcggctggagaaacatttgattcaagccggtgaccgacgccagtagcgggtcaaggcaagctccaaaagatttgaattagcgggcccgatagcttcggctgggcgcgccggacctcatgcaccctgccccactcaatcagggcactcagagctgtagcgtgcatgttgtaaggacctgtgattcacggcgaacaaatgctgtttgacgctgtgagtaggaagctcgaagcccacccacgaagacgaaaggccagccctgcaatcatcagcgggcaacgggccacaccgctgacgcaacaaccccggcctgtcgccagtagcgaggccgggggtttcaccgataggccttggaaacagggcctgacgggaaaccaaccgggagtcaaagcgatggacgaaatcatcagcggcgcatggaagggtcacctcggacgtggccttgcgccaaaagaactgcagtacctgctgggcgccgcccagggcatgaccgccaaggagattgcccgccagttcgacgtggcagcctgcacagtggccaagcgactttcctgcgccatgttcaagctcggcgtgacccgccagaccgcgatgattgccgaggccatgcgccgtcagatcatctcgccgatgtgctttgtcctggcagccttgatcgccatgcacgcaatgatcggtgatgagtcgatgcgtcgtgatcgccgggtgccggaacgtcgcactgcgcaagtcaggatggtgcgccgcgccgaacagccggtgttgctcgcataactgaatgcatcacttctgcaccttggcgatagggtgcagcgggatgcggacgaaaacgcggcctataaccgcccacctgcatgctacaccctcaaagaaaggtggccactgccaacccagtgagcgaacaacggaggattggcagccatgtaaaagcacagatacctgcacggcccagatgggctctgcgggcttgtcacgtacggaggcgtttgtgacagaacgaaaagcccggtcccgactgggcttttttacgccttgcctttacccgtcagcaccctcccctgcgcccaacggcaaacagcaggcggtcaggttgctgacgaatgaacgcaacccactgaggtattcgccatgcacgcatcaattcaacagcgcgttgacggggttgcggccctgcacttgcgctcccgcattgccaccgccgagttctacgccctgatcggcaaggagcagcccgtgcagcagatccgctttcagatcaagaacgttggcaacgcgtaccacatcgttgagcgctccaccggcaaggtgaagggcttccgctggaactggaaggaagccagcaacctggcccaggcgctggaatctcgtgccgatggtgtgaaggtcacgctctcaggcggtgcccaatgatcggtgagccaatacccaacccgcgcgactcgatcatcgaaaacctgaaccagcagctggacgccttcttcggcgccgggcgccgcgtgcaggaagtcgcccaaggcgtaagcggcgtgaaggacggcacctatggcggcgggcacagcagcaagttgcgcgccgaacgcgacaggctggcaccagggctcaagcaacgggccgagagcggcatgtcgatcaacaaggcagccgctgcgctcggcatcgaccacaagcgcgcccggctcattgcgagagagaacggcttcaagttcgctgaaaccccatgaggcgaatcagcaagataaccgccgcgcggcgccgaccggcatgcctggcactgccagcaagtggaattgaagaggtaggctatggccgaggaagatcagcagccgacggcggaagccttgaagcagcgccgcaagcgcgagaaagcggcggcgaaggacgcagcattgggcgtcgagaagtttacagttgaggtcgccggcatcttcaaggccgacctcaagagactgatgaaagagcacggtttcaacaaccagcaggaagtgcatcagaacctgctgcgcaacgtgatcgccgccgactttgaaacagcggcgcagatgctcaagtgtgtcacgacaccttttgtagttaccgaaaaggtgtcgcagcttatccgggcggcaggcctgaagtcgctcgccgaagacccgcctgagcctgaagacgaaatcgaaagccccgcataacccaccctactcgctgcatccggtaacggaggagtgaattgctacataaccatttgagctattgattgtgccgtctgaacccaaaacgcaagattaaacccattatccattacccacttttttagctcgctcttatccagagattcagcaggagactcttttgaaacactgttaactgcatctctcaagattggtaatggagtattttctggaagcttgagtgcttttacaatctcagttagttgcttatcagaaacataaacagtggtatcaataactttattgaagtcgccaaatatttcaatgccagcatcatcagaataaactgctgacccagcaatctcatttccattcccggtaatttttatgccgattgccatattcagatagctccgtgacagcgtttatatttcttgccggacccacaggggcaagcttgatttcgtccgacccggacggctgatttttttctttggtctgagcgaacatcaactaataaattttcgaacctattgttggaaccggtcacatcaatccccgcatttggtccgccatgaattttcatatccttaaatacgcatccatgcatattcgtaaaatgtatggcaggcatgatcaagaacctcaataaagtctgaaaaaaccacaacttattagctttagctattttatccggctcaaagcctctacccccttaaataccccaacccaaaccaaattgccaccaccggatacggagggcggcgcctgactggagatagtccatggacaaaaacaccaagatcctgatcacggagatcccgggtgagtggacccagcgccagcgtaacggcagtctcaacgtgtggaacggggcggatcatcacagatttcaccgcaccactactgacctgcctgaagtcagcctgcggcccccggaaaacggcctgtacgccgagcgaatcgatggcgcctggtattgggtttctggttgcgccaagtgcaacggaaccggtgagaagtacagctacgtggtgtgcgacaaacacaacgtttgccgcctgtgcagcacccaccgctcgaagctcacggaaacaccatggggccaccctgacggctttacctgcaaaccttgccaggacggagaagacgccgttgcgaaagccgaagcgctggccaaggtggccgagaccgactatgacgagtgggattatcgcagccaggacgaatgcaaatgcccgcactgcgccaccgttatccacattgaaaccgaggattacggcgacaagaacatgaaatgcgacacctgcaacggcctgttcgaactgacaaccgagtactcggtgagcttcaccaccaaggtgattggcgagcgaatcacggtctgacccgccctcacctattgcgctgaggacttcggattgcgttcgactaaagcatatttggtgattagaaaatcactctttagatttcatggagataccaagaatacccgttcctatcgctcccaaaagcgcactcaccgtcgactcagcaattattttctccattcccattataaaaatggcgcttaccaacataaagagagcaaaaacctttaggagaacgtcggcaggcaagacatgtttgatttctccagtcgtcgatttattcataagaatcaaaaaaatccacatgattcccagaatcccgaaagggaacaccaagaatgaaatgtacagttggccgttggtcatattaatagttacctcaaagtgggtacctatgagtcggcaggagcgtcaccttctttagctttcgaatgtcgatctcgcagtcacggaaagactgagagaatcctggccaaccttccataaagccagaacatttgcctttgcgctcatagctaccactgtccaattttcacctggcaataacaaatgccccaataaccaatcacgccaccctggcgaggccagaggatgcacggaggtaaacaatgcatgtcctgttttgcagttacggaaacgactccatcgcgctaatccagtgggcgcatgagcgcggcctgaaggatgtcgtgtgcctctactccgacactggctggtccgcaagctggtggatcgaccgagtagccaagggcgaggccctggcaacgggctacggattcaccactgctcgtaccgtttcggaagggatgctcgctctggtcaagcggaaacgtggatggccgggtgccggtggccagggtcaattctgcacggctgagctaaaggtacttccagctttggaatggctcgactttaacgacccagacaaagaggcaacagccatgaccggtgtgcgccgcagcgaaagcaggcaccgttcggacgcggaagagcatattgtggaatcagatcggcatggcggccgggaactatggcagcccctggtgcggcacgacgatgctatgcgtgacgccttactgcatcgggccggcttcgatgtgctccctcaccgatcgcttgagtgctacccctgcatcaacgcaaatatcgacgacataaggttgctctccgaagaccggatacggctgattgacataacagagaaagatctgggcttcaccagaaagggaaagccccgcgtgatgtttcgtactgcacgccgcaaaggtgctgtcggcatccgcgctgtcgtgcaatgggcggcagcgcccaggccgagagaccagatggaaatgtttcccgctcagtgcgactcaggctactgcggcggctgagccagctgccagcagatattcgactactccgacacccagttcgacatgttcgccggccacggcgaggccattgatagcttccgtgttgaatagatcaagacttgaacacagacactaaaccggtcaccgcaccgattaagccaacaataatgccaaaccagtagccaacggcttcgcggcggtgtttttcttcatctctaacggctgccctaatagagcgaagccctttatcagtcaaatactttggctgttttggatcattatcccaatcaacagtgctatacatttcattgtccgaaagatcaggcattggcacattgagaatgtctgctttgtttctgaagtactcggtctggatgagcatcttccattggtaaacctcgtcttcacgacgaatgtagtcattgaattcaccactatcgaagtcattagacaaattcggcgggtaaatttcctctagctttctttctgcttttgcatgctttcgcagatctttcctgtatttcaaatagttctgccacatccacattccattgccccccaccttatttagccggcgagaaatataccggcaaggactccccatgcctacagaaaaccgcaaggcctaccacgtcggcgaaggttccgacggcgagcaggcaatcaccttcgccaccggcaacgcccaagcccgccgcgaagggggcaacgagttgaacctcactttcgaagaggtcagcttttgccgtcgcgcaccgtgggcggatgaattcgcaggaaagcctttcattccagccaaggcgtatcacgatcaaggctggtggctttactgcaacaattgtgagacccagctctacgaggatgccgaagacgatgacggcaaccctcttcaaatcgcctacgccggccgggatgcctactgcgaccaagagtgccaacacattcatgaacagagcattgccagggcaaacgccaaaggcgatgcgttcaaagcgaaggtgctggagctgggcctggacctgacgttcacagagtttgatgtggggtggccgcgcatcactctggaggcaaagttcaaattcccaggatgccaatacggtggatcggttcgggatcaggacggcgacggcaagctgacttggtacatcgccagcgccgaccaggccgcatgggatgcccggcagaaggagcgcgcagcatgaagcgcatctacctgagcggccctatgaccggcctgcccggcctcaacttcgccgccttccacgcaatgaccaccaacctgcgcgccggcggccacaccgtcaccaaccccgccgaactcaaccccggcggcgggacctggaacgactgcatgcgccgcgacattgccgccctgatggactgcgacaccgtggccaccctgcccggctgggagcactcaaagggtgcccgcctggaagtcctgatcgccgaacgcctcggcatgacggttgtgaatgcccatgatctggtaacgagggaggctgtatgagccgattctgtttttgtaactgccctgcgggcttctccgccgagcctgagcgtcacgcacctgattgcccaggccgatccggtgcaggcaaggcacggacgccagtgccggccacacttaccgcttcgcagccggtggacagtggcgtggattttggaattgacgggcgatcggtgcgcgtatcgcaggaggcttactcgatcttcctggcgcgtgaagcggccggacgagaaaagatcgcggccctgcagatgcgcctgaacgcagcggatcagaagaatgatgaactgaccgtcacccagcagggcgacatcaatatcgagccgccgcactataagcccggtctctacgccgtgaggcacatcgacaactgggacggtgagcgcgatgtagctttgacgttcgccaggctggacgcagccggcaagtggacacacgaagaaacgggtgaggcccttctggtctactgcggcgacaaggttctgagggcttggccgctggattgctccgatgcaccggacgcacaagtcatcggtgtgccgcgtgactggctgcaagaatgggcgcttgaacttgtcgaggccgcgcaggatggcgggcagatgtcgaatcaagtcgagcaccttctcgaaatccactccaagccgtaacccctcctccttcaaagtcagccgctatagcggcaaggacgacaaatgcctatcgaaaaaatcgaaaaggaggccgacctctgcgcgctgttcatccaagagttcaacgcgctgccggattggacctgctatccagaggctggcggcttcgacgttctggtggtgaacactgatgggcgccagatcggcgtcgaagcaaagatgaccctcaactcgaaggtcgctgaccagatcctgccgaacgcctatgaagacctgaacgaaaggccaggtcctgactatcgcattgtcatcgtgagcaagatcaccgacgcgagcgcgggcatcgtgaagatgctcgacaggcttggggtcacggtaatgcagccccgatcaagctggaccagggagggtgataagtacacgttcgacctcgacggaaagctgctcgaggtaagcgggcgcacgccattctatgaccgctatatgttcgattggaatccagcggaacggtgccaggtgccgatcatggtaaccaacctaccagccggcgtgcctgctccggtgcgactaacaccttggaaggaatcggcgctcaaggtgatggcccagcttcgcagccagggcttcatcacctcgaaacagatagcggcgcatgggattggggtttcagcctggacgcaagcccccggcaccaaaccagcctggctcgccaaaggtgtcgtccgtgggacctgggttgaaacagaacaccttcccgccttcgacaagcagcaccccgaggtatacgcgctcgccgtcgatacgctcaaagccacccttccccagctggagttgacgccatgatcgccaccctctggttcgactacgcgttcatctacaaggggccaaggccatgaatgcacaagtcctcgacccctgcagcgccagccgcatgatgtggttcgacaagggcgaccaacgagccctattcggcgatatccgagacgaagagcatgtgctgtgtgatggccgggtgttgaaggttgagcccgacgtcatcatggactttcggcacctgcccttccctgatgccagcttcaatatggtggtgttcgatccaccgcacctggtgcgcgccggccgcgaaagctggttgcggctcaagtacggaatcctcaccgatgactggagggacgatctccgcaaaggcttcgcagagtgcttccgggtgctgcgacccggccagttcctgatcttcaagtggaacgagacccagatccgggtcagcgagattctcgcccttaccgatgagcagccgctgtttggccacaagtcaggtaagcgcgagaaaacgcactggatcactttcatgaagcgtccctaaccccaatccccctacatgcctgccggtgagcggcgggcgaggtattcctatgtccgaagaaactgaagcgctgtatgtcgtccacgcccagggccccgacgatctgtacgcggccgccagcaaagaggaagctgacacgctggctgccaagcataacgaactggtgccgatggcgaattgcattgtgatcgtcagtccgtgggctccggtcgagcactggaaaaccctcgccgagcagaatgcggaagacgcaaagtacctgcgcagcgggtggcaagccgacctgaaccggctcaacgctgcaaaagctgaaatcaccgcactgagcaagaacgtgatcgacatgacctgtgaggacttcgacgcaacgctgaacaacctccgccggatgggcgccagcatcgacggcgacaacgcctacaagcgcgatctgtgcgactcgattttcggggccctggccttcggcgcccaaaacaccaacccgccaccggcagatcactggggccagcgcttctgggacatcggccgggaggaacgtgcgatgcaggaagagctgctcgaaagcctatccaacttggtcggactggcgaaactcggggccgccaggctcgacaagtaccacgcagcccttgcccacgccgaagcagtaatcgccaaggccacccgctaaccaaccttctgccgcccagcgcggcaaggaccccccatgtactcaataaaactcaccctgctgatgctgggcgctgtgctgtacgtgtcagctacggtctgctggttcttctggctcggcccggtgctgctcatggacggcgagacggccgacattctctacgcctttgccggcacctgcgcctggctgctggtcagcttcggcattgccattcacatcatcaagacagcgcggcccactgcgggcgcaaggagagagccatgaacagagcagagaatatcgaccgcttcctgcgcctcgacgaggtgcttcacaccaccggcctgggccgtaacacggtttatcgtcgtatcagggagggcaccttcccaaaacaggttagaataggtcccaactcggtcgcttggcgccagtcggcaatagctgaatggatgacctccatcacgcccagcaacgaccaatcagtacattgatcagtacaccagcaactgacaatcgaacagaaccctttaaaaccctgccatacaggttataccgtggaaatcttcaaggaatttacattcgaatccgcccaccgcctgccccacgtaccggaaggccataaatgcgggcgcctgcatgggcattcgttcaaagtggcgatccacctgagcggcgacctcgacccccataccggctggattcgcgacttctcggagatcaaggcgattttcaagccgttgtatgagcgcctcgaccacaactacctcaacgacatccccggcctggaaaacccgaccagcgaagtgctggccaaatggatttggaatgagctcaagccgttgttgccggagctcagcgcgattcgcatccacgagacctgcaccagcggctgtatctatcgcggcgagtaaaccggcgcgctgaaaaaaccaccctggcggtggtttttttatgcccggctaacttacagtcttgactccctgcccaaagagcgcgctgcaatgtccacctcgatacgcttcgcgactgccagcgatgttccctcaatcgaagccatcgtcgaggcggcttactcgccctacatcgaacggatcggccgccagcccgggccaatgctggaggactatcgccaactcgtcgaaaccggtgatgtgcacgtgctcgataatgccggccaggttcaaggttttattgttctgttgaatgaaaacggcgcgtttgtgctggataacctggcggttgctccggcagctcaaggcctggggttcgggcggctattgatggactttgcagaacagcaggcgcgcgacgcgggctaccctgccatccatctgtataccaacgaaaccatgaccgagaacatcgcgctgtacgcccggcgcggctacagggaaacccatcgcgccgtagagtgcggcctgcatcgtgtgtatatgagcaaacgcttttaggagcaaccatggaaactatctggctggcccaggccaagcgcttgcaagcgttggcctccaccgggctgcacttttgcactgatgatttcgagcgcgagcgccttgaggaaatcgccgagattgcccacagcatgctcgcgcaattggcggatgtaccgctggagcgcatcagcgggctggtgactgactttgccaaacgctattcgacaccgatgatcgacgtgcgcggtgcagtgatcgagggtgatcgcattctgctggtgcgcgaattgaccgacggctgctgggccctgccgggtggttatgccgatatcggtttgtcggcggcggaaaacatcgtcaaggagatccgcgaagaagccgggctggccgtgacggcgcgggcgctgtatagcgttacccataaagccaaggggttgtatcgcccggacgtgcgggacttttacaagctgtacttcctgtgtgaacgcgaggatcacgttgccccgtcggccggttttgaaaccaccgaggtaggttttttcagcctggacgacctcccgccgctctcccggggccgcaccatcgaaagcgacctggaagccgcgtttgccttccatcgcggcgaaaccacccagacactgttcgactgacaagcacttaatgcctgattgcttcagctcaagaggaacttgcccatgcatatcatcaacgcccgcctgcgcaaccgtgaaggcctgcatgatctgcacctggaacatggccggatcgccagtatcaccgcacaaacaacagctcccgcgctggcacccgatgacctggatgccgccggtaacctggtaaccccgccgttcgtcgagccccatatccacctggacgccaccctcaccgccggcgaaccgcgctggaacatgagcggcacgctgttcgaaggcattgaatgctggggcgagcgcaaagccaccattacccaggaagatacaaagacccgggctaaaaaaaccatccaggccctggccgcccacggcatccagcacgtacgcacccacgtcgacgtcactgacccggacctcaccgcgctcaaggccatgcttgaagtacgcgaagaaaccacgcacctgatcgacctgcaaatcgtcgccttcccccaggagggtatcgagtcttaccgtaatggccgccaattgatggaagaagccatacgcctgggcgccgatgtaatcggcggtatcccccacttcgaatacacccgcgaccagggcgtgagctcggtaaaattcctcatggacctggccgagcgtacgggttgcctggtggacgtgcactgcgacgaaaccgacgacccccactcacgctttctcgaagtgctcgccgaagaagcgcgtagccgtgacatgggcgcacgcgtgaccgccagccacaccaccgccatgggttcttacgacaacgcgtattgcgccaaacttttccgcctgcttgggcactctggcatcagctttgtctcctgccccaccgaaagcatccacctgcaaggccgcttcgataacttcccgaaacgccggggcgtgacccgcgtcaacgaactgctcgaagcgggcatgaacgtctgtttcggccaggattccatcgtcgatccctggtacccgctgggtaatggcaacattctgcgtgtgctcgaagccggcttgcatatctgccacatgctgggctacggcaacctgcaaagcgccctggacctggtcaccgataacagcgccaaagccatggccctgggtgaccgttatggcctggagcccggccgcccggcgaacctgttaatcctttcggcagacagcgactacgaggtgatccgcagccagggcttggcgctgtattcgatccgcaacggcaaggtgctgatgaaacggcaaccggctcaggtggagttcgtgtaagccgacagatcagacaatcgaatcgatatccagcgcttgcacccttccccgatcattgtgggagggcggcggaacactggcgatttgggacggctcgcggttttcacgatggcggaaccagcgattgaggctgggttgcagttgcgtggagtgggcgtgactgccatacacgtcgcgggcctcaaggcgccgccagcgcagggtttccaggcgttggcggctggtgcgcaatcgatcgatttcggcgttcaatgccgggttatagtcgtgttcattgcttcgctgattgggtgggcggcgacggtcaagctcacgccttttgtcgcgcagttgctgagtcatcgtttcaagcgcactgtcgatcaactcaaactcccttggcgtgaccaaagccccctggctttccaccgtttgctgccagcgccgcagtgtggcccacgccgccgggatatagctggcggtcatgaagtgctcattcgcctgaaacagctgtttaagcaggctgtcgcggttgggcatatcaccgtgcagttgcaccgcgcgattgcagcccgcctcctgaattgactcacagccgggcttccacaatatcgaggagcgtgtaccgtccgggagcgtgatcggcatgaagtgttgttgctcgccgtgatgccggtaggggttgccaccgatgcgcaccagccccgcagcaaatagaagaccgcctggagcaggtgtgctgaacaacatcacagctcccgggatccataatttggcggtggtgttcatccagggtgcggggacgctggggacggggtcgttgtggttgacaatgcggtggtggaccagggaagaggcaccgtcggtgaattcggagtcgccagcgcggggggcgccgtaggtgtagaggaggatgttgtattcacgatcaggcgtgcgccgtaacccttcagccaagagcaaagcgattgcaccgcccaggctgtgaccgcagatgattacccgttgccgaacatgaaatttttcgaggtagcgcagcacaaaatcgcgcatggcctgacaggcttgataaaacccttcgtgtacccgaccgactccctccgcaaaatccacctgatgggcgtttgcatcccgcaaaatatcggcgccactgaccgtaccccgtactgaaatcagaatgacttcatcgtggtgggtgatgaacgcctgggtatccgttccgaacttctcatcatcgaagaaatgcagacttgaagggtgctcctgttgttcctcgagttgcggacggtttggcggatacagttcgggatcaaaaggcaggatttcaaacctgcgggagtaaggaacgtcttcataaagcgggtagtagcgctgagtttgttccggatcgattcgccaggcctcctcaaaccctgaaagcttgtcggcaaacagatttccaaccgtcgggtccagaggaaacgacacttgatcctcaggctttttggagggttgctggccaaaaccgcagtaactcaggcctgccatcagggccaactggtacaggttcaaggcacagaacttatcctcgatggacagtatcggacgcagggcgcgtaaagggcgtacctccagcacgctatgttgattggggaacagtacaacgccagtaagattgggctgtggagggccaaaccccagatcggccatcattttcagtgcgtggcgttgagggctatgacgtcctggaattggcggcggcaggtgagccacatgacgaaccagatcactcacttcaacttgataaaaccggtctgcctgcgaacgtgcggggttatcctcaatacgatggccatcctcggcagaaaaccgggtttgttcggcccgaacttgaagctcggtgatgggaagttgataggcttggcgaattcgtaatcggttatagggctcttgcgctccggaatacaaactgtccagtttcaggaccaccgggccgcagtaaaagccctgcaacctggcgaatccgtccccgtccaatcgtccgtcgtactgacgcccggtactgtcgtagagggtatacgggaggccaccgtaggcctttccactgccggtttcatccacaaggcaaaagctcgcccaatgccctttcaatgcgcaagcaggcatcttgtcactgaaaaaaggttgcttccaagcgtcctgcttcatgatttaactccttgttattgacacgatgggtaaacatcgcaaatgcgcccatcgggcatttttacaggtttgaaatctgtggtattgcccctgcagtacgcggataaatcttcgaaactctcccctctgcaacgcctccatccgcccgaaactgccacccagttgtcgtcaaacgcaggcagttcctccttgttaacgctcattaccaacctgagcgttttcccccttaactgatcacgttgagcgcctccacccgctttgtatttttctggctgcccctgatcatccagagcgttgcatcccaggattttgctgatcgcatgcttacggccaaccgtgcggaaataccatcgacattgccctcgcagctcctgaactcccgactcaggcatttgcgcaaaaccctccggcaagcgatcagggataccaatgctcccgctatcccccccagcctcccagtaacccttcccccacttcgcataaaactcaaactgcacactgctcaacaccgaagggcatccctcaatggtttcactcagaggcaattcgtaactcacccggttggccacggggttgaactcggtaaagaacaacttgcgctccggtctcttgcctcgacgtaccggcaaggtgcaggtctcacctgtcgcggggcggtaattggcagccgttttaagctcaaaatccgccggcaaatccacctccagcgtaaaacgatcagccggtttgactgaacaccccgaaagccatcccatacccaacaccatcaacaccccgagtacccgcttattcatgcgccctccctaccctgcaccactgctccagcacccttgcaaaatgttccatcggcgcctctgcctgcatcggctgccactgaatcacacagtttcccgtcgcctcctccaaccggcgtaccaccagaaactcaagctgctttgccccacaccagtgccagacacgcgcctgctccaacacgtgcgccagccagatccgtgggtcctgaaactcgaccaatgcggcgaggctttcgctgtgttcggtcaagagaaaccgcaagatgttggcgtgcagaatggccccggccctggggttgggtgtggtcagccagggtgccggaacgggcaccgggtacttgcctggagcagggttttcagcctggcaccaacggtcttctttccagtaacaaacgctgatcaggggcccgagaaaagtcggtcggtgctcgtttggcaaatgagccaaagcccgcgccagcgtgcggttatcgtgaaaacggtagatcgcctggctgctctgcgggccgaccagcaagcgctcgcgccagtgacggacgacgcaagccaggtcatcggcaggcaggctacccagccacccccagtttgcttggggctgttgcagcagatcgaccagcgcaggttcgcccacctgctccagcaacacgatcatcgggccgacagccgaaagctcggctaacgcggtctcactgtaaaacctgcaatgttgtgacaatgaacgggcggccagcagcgcgctgcatgcttcgtgcgcgccttcaagtatcaagcacaggcggcgccccgcctgttgctgttgagccatccagcggtggggcatctcctccatcaggctgccctcccgttgatatcgcacaggccttcacggcattgctcacacactgggcaaaagtcggcgtccatctgccgggctgacgccatgagggcgccctgcgcggcagatagtttcgggggctgcgcgacaaacgacgggctggccgaacgggtagcgggtggcgtgcctgcgaccgtgacgggcctgctgctgaaaatggcacccgcctggatcatcaagtgttctccgccggccttgaggctcagttgcgcgccaccatcgatcaccaggctggcacccgccttgagcacgatctgctgcccggcttcgatgaccagggactgaccggcataagtctggctaccgccctgcacattcagatggtcatcggcaccaagtaccaccttgcgatcaccggttacctgatgctgctcctgccccgccacatggaccgtgtttgaaccatgaatggtctcacggcgatcgccggccacctccaggcggctgttgtggcccacttgctgctccaggtcacgctgggcacgcagataaataagctcctcgccacggcggtcctcaagatgcaactcattggcgccggcacctcccggcgagctgcaagtgcgcaaaacactgcgcgtcttgtgttgtggcaagggataaacaggcatgtgcaacgcattgggcagacagcccgtgatcaatggctggtcggggtcaccctcgagaaaagtcaccagcacttccatgcccacccgcggaatcagcgttgcgccaaaaccgtcgcccgcccagccggatgccacccgcacccaacaactgcttttatcatcggagttgccgaggcggtcccaatgaaaacggaccttcacccggccgtaggcgtcgcaatgtacgtcctcaccgggtggccccgtcaccgtagcagtctgggcccccttgatggttggcgcggggtgtttgagaggcggccgatgcacagcgctccaaggtgttgcgctgaaacggttgcgatacccctgaaacacatcggcgtcgaccacggcttcctccagtacctggggttgatacccctcatgtcgcaccgacgtgatcaaccacaagtcattgcaggagggatcagggtggttctgcagctcaaggaagtgcccgcaactcagcgccggctggtcgctcctgcccaaggcccgataacggtcgctttgatggcgctcttgacctcgacccgccaattgacgcccccgtgcacggtggctgaaccccccggggtagcggtagtcttcgagagcgtgtgcggatatggagccggcttgttcgtgcaggcgcaacgagggatgctcaaagtcatgatcacggcataccgtttgctggctgcgggtttccaggcgcacgtcgaagcgccgtattgctcgtgtgccggccgccaggtcgcccactgagcaatactgttgcacgggcaagcgccgaaacaccgtttggtcatctccgaacaccaacacgtggttatcggggctgtgacgaaagtggtaatgaataccctctgcttcacacaaccgctggatgaagtgcaagtcagattcggcgtactgcacgcaaaacgggcgcgtcgggtaaaccaccgggccgagctcgaaggtataggcatcggccaggatgccgtggcgttcaaggactgccgcgataatctgcggcacattgcattgctggaaaatttgctggttccgacagtgagcaaggctcgccaaccggggcgccagcgtcaggtgatagcgcgtgaacctggcctgcggttcatcccggccgatggcgtagatttgcccatgcagccctgtctccatgtcgccgaagtcaagataggccggctggtggagcagtgcctccaggtccagggaagggttttcgctgactaactgcagttgaatgaaataaggctgatcaagcacttcactgcccttgaaagccagcacctgaaaatcgtctgttatcccttgaagatttaatttgaaacgcgacgaaacaaacccgtcaaccatccgtagttacctgtcatcaagtcattaaccgaaaggcctccccccaatttttaaatgccgtttgaagtgttgggaaaaagcgcctgaacacggtaaagcttagcgattcaaggtgggattcggtccatcgaatgacaaaaaggacgtttcgtacggtgtgatcagaagggacttttacagaataagacggagcatcaacccagcaactttaaacaacaagaaagttcccacactcaaagtgcgaacttaatgactcgataaagaaacagctgacacttattcacactatcagccgtttctcagctttcaggcttgcgcgcgtgcaaccccgaacaggctcacgctcagcaatgtttcaccctggctgtgtaaacgcactggcgccgtgccacctggcatcaccacgtccacgtccccgctctcgacccaccccgcccgccaggccgcacacgccacggcactggcgctggtccccgaggacgcggtgggcccttcccctcgctcaaacacccgtgcgatgacttggttgcccacagaacgggccacccattgcaaattgacacctgctgcacagggttgcccgagcccggccggtggcgcgaaggcaatcgcctgcaacggctcgaacagccaagcctggtgcatcgaagggttgtcaggcagcgcgtcagcgtgctcgacgagtgtcacgcaatgcgggttgcccacacgaacaaactggctacgtacccaatgcgggttgagtgctgccagtgcggggacatggctgaacccatgatgaaccatgcccaccccttcagcgcttaccgctgatggcccgaatgcagggcagcccagcgccagccagaaaccggccgcatgatcaatgatcgccggttcaaccggcgttgcgaccggtgatgccgcatccggcttgtcatggtgcacccgcaattcgcagccctgagtcatcaagccctggtccgtcagcgcctgagcaaaaatcgtcaagccattgccgctgcgctcggcaagcgtgccatccgtgttgacgatcagcaggtcaaacggtggcgctgactgaaacggccccaccagcaagccatcgcagcgataggccttggcatcggccgcacgcggcaaggcgccccagccacattcagactcaattgctgacgcagcccaagccacgcgttcgatcgcagcgcggtccgcgcgctcgggaacgtcgaccccttggcttcttaagcgggctgggctgaccaccccgtagatattgccccgcgcgtcgtagaaccgggtcatttagccacccacctggaaattttcatcggtccgtccgttcagtacctgcacactgaacagcagcgtattacagaaccgttggcccgtgggaggtgagctgggcggcggtcatcgacgcaggccctcgggttcatgcgttcttgcgaggatcacgcgccttcagcccaacgcccgcaagcttaaccgtcctcatacggccacctgcctcctgctcgttccggattggtaaaaataaacgcccaggccggcacccacagggaacccggctcgcgccacatggcctgatgtgcaaggatgtcgcgccggacatcgttcattgaacgcaaaaccaaggatttttcatgactgccatccccactccagcgcccgtggttcccgggcggctggagcaaatgtcgacccgaattgcttttttcatcgcaggctttggcattgcagcctgggcccccctggtgccgtacgccaagacgcgtgtgcaactcaatgaaggcacgctgggcctgctgctgttgtgcctgggggtggggtcgatcatcgccatgccggtggcgggtgcgctggcctcgcgctatggctgccgacgtgtgctgacggccggcacgatcatgatctgcctggctctgccgctgctcgccacggtcagctccataccgttgctgatagtggccttgtttctgtttggcggggggttgggcacggtggactcgacggtcaacctgcaagcggtcatcgtcgagcgcgccagcggcaaaaccatgatgtcgggtttccatggactgttcagcctgggcggcatcgttggtgcggcaggggttgccgggttgctcgggctgggcttttcgccgctgcaggcgacgctggtggtgatcgtcatcatggcgctggcgttgctcaaggccggaccgcacctgttgccctatggcagtgagagctcgggcccggcctttgccatcccccacggggttgtactgtttatcggctgcctgtgcttcatcgtgtttcttgcggaaggggcggtgctggattggagcgcggtgttcctcagtgccgaacgtggccttgatgaggcgtacgccggccttggctacgcggctttcgccttgacgatgaccgccgggcgcctgaccggtgatgccatcgtccggcgcctcggcgcaacccgggtcattgtgatcggcggagcgctcgcaacggccggcatgttgcttgccacgctgctgcctgcctgggaaacagcgttgttggggtataccctggtaggtgccggttgttcgaatatcgtgccggtgctttacacagcggtcggcaaacagacaatcatgccggaacatatcgcggtacctgccatcaccaccttgggttatgccggtattctcgcggggcctgcggtgatcggctttatcgcccacggcagcagcttgagcacagcctttgtgctgatcgccgtgttgctggccggtgtttccatcagtggcaaaatcctcaaggtgtaaaccactcaccttatcaaggccaggtcactacctggccttgtacatttcatgctgctccagccagcgctcgatgcttttgttgcacagccacccgtcatatttggggcgcccaaaaaagcgcgcctgattagcccgctccaatgagcgtaacaagcccggtcgctcaatgatgtttttggccgtgtatacacaatgctcggggtacttcttgcgaggtagcccagtggtgggctccagaatgggagcgcccctcgaatcggtgtcatccgggtcatccatcactgtctgcagcagtgctatttccaggtattcgagggtttcaaaaaaacccgggcggtctttgggctgatccctcagttgcttgaaataaccccgcagcgcctgaacaacctcggcattgccctgaccatgaaaaggatcctggctgaatgtctggggggagctgttacgccccagcgttgccgccgccgcgctcaagctgtcgcgggtgatatagccctcgtgatcaatgatcgtgtcattcaacagtaggcgcttgagaatttcgcgagccacctggatcacacggtcccgcacgttattctcccgccacgggttgagctgcaatttgttgcagggacgattgcgtcaggcgtccgccctttagaaaggtgtacagctctccaaagctcttttccaactcactcgccaattggctgtcgctggagttcggccccggaggtgcagtgtctgcccgcacgatcggcgcgttctgcaatgcctggtagcgcagcgaggacaaggccccccgcaacagcgcaggccgtcgcgcgggcacctgcgggcaagcatattgagcgtcactctgcgaatgaaccgctggcggcgacgaagtccaaccgacctccgatgcacgcgtgtccgttggttgcccacgcggtattgcaccctcaattttcatgcgatatctcccacctttttccaaatctgcgcaagcctgaaggccatcaccgaagcgccctgaatcatcgaatggattacgaggcggccagcaaccgatgtgtggctggcgcaacgcattagttccggacatcgggggaatgccaataacaacatgtaaaaacgcaaacgtgggttcattccggtttttgaccgcgccaccacgtcatgaagcctttggccaaggccgcccacgcgctcctgggctgtgtcgacttggcatccgtgtggttgggttgaccgactgcaagcatgccacggacgaaatcctcagagacgggtgcctgaaactggcgctggctcgcgaaggttttcatcggccgcttttctgtagcgtacccactcgtcagggacgtgccgtgggcgagtagtgaggcttcctcggtttttgcagtgactgactgatcagcagtttcgccgctatgaacagtttcacagcgggtttggcaggatttaaacgaagtcgagttcatgcttggctctgactcaaaatctgaaaagcgaccggtaccaccaaagccgccagggttcacgccctatgtggcgaatgtgtgcaaatggttcctgggacaccgcaaaaataccaggcgctgcggttcccgggcagcgcctggacgcgcaccactaccccagcaggcggggcaatgcatcgagggcctctttgctgatgcctccatctgcataggtgctaaacaggttgtccattgtcatcaggaggttgtttcggtcgaccaccgtgcgagacaactggataaggtggtccctttgagggttgcctgtcagattttcggtggccagcgctctcaggtcgctgacagcgatttcgttgccaaagaacgattccagttgatcgtaatggctgcacatctcctgaacgatttgcttgtcagtcatgtacttgaaaacattactgtcgagaagaagacgggtcagttgctgcttgtcgatccgaccgtccgtcgtacctgttcccggggttcgatcaaaggctgccagcagatccggccgccgcataagctgcttggccagttgtatgttttgattcatcacggggtcactgcccggctctcgcattgccatttgagcaatagctcccgtgctcatcgttttcaaggaacgcgaaccggtaaatgcactgaaattgtcgagcagcgtctgccccagttggtcgttcgtccaggtcgcataatcaggggtcggccgcccagctcccggtgagagcgggcgaccgaaccattggcttatcaactgctgcaactgttgcatgaacccttgctgcagggccggcttcgtcatggcgagcgggatgttgtgatgggcagagtgagggtgctgcccctggaggtcggccggccgctgatgaccgccgaacaccgggcccgcatggtcgcaccctgcgttaaagttgatgttcgcagtaccctggccattgaacaacagtgccgcagatgcatgccggctcgccttggcttcgggcatggacattgatggcgactgatccgtgattgatgagtgagatacagatgtttccagagccggtaccgacatagatgtctccattacaatgaggattgatcttcaacctgttgctgcgtgtcacacttaatggcaagcaagcattcccccctgtgtggcatatccaccggaataggttcctggctacgtagtaaaaggtttgggcaggtgcaggaaccaggcaaaaaaaatcgcagcccaagggctgcgattgttcaaatcaacggcaggtcagaagccgacacttgcctgtacgaagaacgtacgtggctcgccgaggtacaagccggcgttgttgtcgctggagcgggtgtagtgctgctggtcgaagacgtttttcacgccaacgcccaacttcaggttcgacaactgcgcaccgaagtcataaccgctgcgcacgttgaccgagacatagcccggaatatcaccgtactggccgtcggcagtgccttgggtgatgtaggtggtgccggtgcctggcgcccgttggcctgactgcgcgtaaacgtccaggttatgggtccagtggttgatgtcatagcgcaagcccgccgtcgccacttcacgggaatacagcggcaggtcgcggcccttgaacggcacatcaccctcagccgtagccttggtgtaggtaaaaccggcgctggcggtcaagccgtccagacgcgggtccaggttcgacaggtcgtagtgtgccgacgtctcgatgccctggtgtttggtcgcgccgaggttggtccagcccacatcgttgctcacatattgcagctcatcggagaagtcgatgtagaacagcgtcacttcgccgccccacacgctgtcgttgtagcgtgtacctatttcgtaggtcttggctttttccgggttcaggccatcggcggtctggttgacccggccgccctgcccgatctgcgcatactgcaggctgccgaacgaattttcatagttggcgaacactttccaggcatcggaaatgtggtacatcacgctcaacgccggcaacggctcgttgctttcgatcttgcggttcttctccacggtacgcacaccgttcagcgcgaccaccgggcgatcatgccaagtggtttcgatgttttcgaagcgaatacccggggtgatggtccatttgccgatatcgactttgttatcgatatagaacgcattggctacggtgccaccggtgcggtcctgatacacgtgaccatcgttttggccgcccggggtcggcacgttgttgaccaggttcaggctgctggcttgctcgtgcatgccttctttgaggtagcgatagccaacgctgacttcctgggtgctcgggccaaggtcgaacacatgggacatccgcggctcgatcccgaaggtgtagtaggtgcgcgggtacgagccgatcgttttcaaatcgcggttggcgatgttgctgccacggaagctgtcggtgtagtaggtcagcacttcggcctgggtgcggtcgtcgatctggcggatgtacttgaaggacacgtccttgcgacggccactgaagttgtcccagtcacgcacagactggtacgggttggcgtcgaattgcttctgcgtcaagccacccggcatgtcggcggtggcgtcgtagtagtgaaaattgaggctgaagtcgtcttgatcggtcggtgcccagtgggtcttgaggatcacatcgtcgatgtcgttggagttgttgctttcgcggtaaccgttgccgttcacaccggtgtaaagcagcgcgacgccaatgccgttgtcggcagtgccgcccacaaacgcgttgtcgacgtgtttccagccaccgtgttcagccgtttgcagggtggtgccgacttcacctgagaatttctcggggatggcgcgggtcacgaagttgatcacgccacccacgttctgtggcccataccgcacggaaccggcgccgcgcaccacgtcaatactgtccaggttgccggcggaaatcggcgccatcgacagttgtggctgaccatacggagcaaacgctgccggcacgccgtcgatcagcacggtggagcgcggcgacaggcgcgaggtcaggccacgcacgccgacgttcagggaaatatcactgccgccggtgccgttggattcctgcacctgcacgccaggcacacggcgcaacacgtcgccgacgttcattgcgccctgctccaccatcgcttcgcggcgcaccaccgtgcgcgcaccagggtggttctgcaccacagcggcgttggcgtcacccagccagtcgccaacgaccttgacgtcggtaacgcccagctccagcggagagccggcttcaccggtgccgctgctcagtgggcgcaaggtcacagaacccgcatcgatctgataatccaggccactgccttgcaacagttggcgcagggcttgttcgggcgaaaggttgccgtccactgcaggcgcttgtttgcctgcgaccatatccgggctgaagaacacttgcagagacgtttgctgacccaactgactcaaggcggcccccaacggctgggcgcggatgtggattccatcatcagcataagcggcaggcagcgcggcgctgacagccagtgccagcgcgagaggcgcccagcgggagatattcttgttgtagacggcaagttttttcacgtcgaacccagtcctgtgatcgcaagagtgtgcggctgttaatgcaaaccagttgcagttgcaggagaagacgaagaactcgaaaaaaacctgaacgtcagcgtgaaataatttcctggctgccatccggcaaggttctcagggccaccggcaggatgtgcggcaacgccttgagcaaggcgtcggtgtcattggccttgaacacgctggtcaagcgcaggtctcgcactgcagccgtactgacacgcaatggctgctcgcggtagcgcgacacctcccgcgccacttcacccaggctggcgttgttgaacaccagtttgcccgtgcgccaggcggtcagctcttcggtgttcacggcataagccgccatcaccttgcccaggctgtcaatatgcgtgccccggcctgcggtgagcgtgacgatttcatccgccgcgcgcccttgcaccttgaccgtgcccgcctcgaccaccacgcgggtctggtcgtcgtcacggcgcacgtcgaaacgcgtgcccgtcaccgtcacctgccccgcccccgccgccaccacaaacgggcggctggtgtcgtgctcgacgctgaacatcgcctcaccgctcttgagctctacgccgcgccggcctttttcaaaatgcacagcgaccacgctgcggctgttcaaatccatcaccgaaccgtcgggcaacgccacctggcgatgctcgcccacgcgggtactgaactcggcgctgtagggtttggggtgatcaagcccgctgaacagccccaaccccaacgccacggccatcacactggcggcgacagcataacgcacgattgcacggcgtttcgggcgctccaggggcgcctcacacaacgcctgcaaacgcgcctttggcaacaagtcagtggcgctccacagcccttgcaacacatcgaactcatattgatgttcgggcttctctgcacgccaggcgtcgaagcgctggcgctcttcagcgctcaacccggcatcttgcaggcgtacaaaccattgcgcggcttcatcgcgggcatggcgatcgatcatggaagatcctgtttcaaagcgggtcatggggccatcgcatccaggcggtcgcgcagatgccgcagggtgcggatcatatacttttccaccatgttttttgacaaccccaggcgtacggcgatttcctgctgggtgagcccctcgattttctgccagatgaatatcttgcggcagttgagcggcagctcggccagggcctgctcgatggagtccgccagctggatcgcgtgcatgtactgctccgggtcgccgctatggggcgagctctgatcgaaggtttccagcgccagcgcctcgcgacggtcttcgcggcggtaggcgtctaccgcaatgttacgcgccgtctgatgcagataagcgcgcggttgctccacctcgcccgagcgggattcaagcacgcgcacgaaggtgtcgtgggccaggtcctcggcctgctgacggtttctcaggcggcgggtccaggtcccgatcaactcttcgtaatgctcgaaaaagcctgttctgcggggcggctgaggagtcatcgcgtgggcactggggaggcggggcgtgaatagtaatgcttcctattaagcggagcaattgctaacggtcgcccgcataaacggtgaacttgtgcgccgccgcgccagtcagcacaaaggactctcataaaacggtgggtgggcgatgcagatttcattgcagcaacaagtggccctggtcaccggcgccagttccggcatcggcgcgggtgcggccaaggcgttggccgaagccggcgcggccgtggtacttaattacaactcacaggccgcgccggccgaggcactggcggcgcaaatcaatgtcaacggcggccgggcgattgccatcggtggcgacgtgtccaaagaggccgacgtggaacgcttgttcgcccagaccctcgacgccttcggccacctggacatccttgtcgccaactccggcctgcaaaaagacgccaacctggtcgatatgacgctggacgactggaacaccgtgatcggcgtcaacctcaccggccagttcctctgtgcccgcgccgccgtgcgtattttcaatcgccagggcgtgcgcgacggcgtctcgcgggctgccggcaagatcatccacatgagttcggtgcaccaggtcattccatgggccgggcacgtgaactacgccgcgtccaaaggtggcgtcgagatgctgatgcgcactctggcccaggaagtcagcgagcaacgcatccgcatcaatgggattgcgccgggggcgattcgcacagcgatcaaccgcgcggccaccgaaggcgcggcggaaaaagaactggtcaaattgattccctatggccgcgtgggcgatgtggaagacgtggccaacgccgtggtctggctggccagcgacgcctccgactatgtggtgggcagcaccctgttcattgacggcggcatgagcctttatccggagtttcgtggcaatggttgatttcaagaacgaaccccaaagcgccatcgatgcccacggcatcatcggcgacatgcgcagcgcggcactgatcaacgacaagggcagcatcgactttttctgctggccggaattcgacagcccgtcgatcttctgctcgctgctggacacccccgacgccggtgtttttcagctcacccccgacctgccaaacgcccgccgcgagcagatttacctgcccgacaccaacgtgctgcaaacccgttggctcagtgatgaagccgtggtggaaatcactgacctgttggtgatcagcgaagaaatcgatgacctgccgctgctgatccgccgggtccgggtcgtgagcggcaaggcgacgattcacctgcgctgcgccgtacgccatgactatgcacgcgcgccaacccgcgccagcgatgttgacggcaaagtgcatttcagcactgaaggccaacccggcctgcgcctggcgagcagccacccgctgcagattgaagacgatgccgccatcgccacgttcacgctgaatcaggaagaaggcgccgaatttgtcctgggcggcgccgaggacgaacgcgtcgacagcggctgcacggacctcgccctggcacacaccctgaagttctggcgcggctggatcgcccaatccaactaccgtgggcgctggcgcgaaatggtcaaccgctcggccctggccttgaagcttttgacctcacgcaaacacggcgcaattatcgccgccgccaccttcggcctgccggaaacccccggcggcgaacgcaactgggactatcgctacacctggatccgcgacgcctcgttcaccgtctacgccttcatgcgtctgggttttgtcgaagaagccaacgcctacatgcgctggctcaagggccgggtcagtgattgctgcggccagccgaccaaaatcaatatcctctacggcatcgatggccgtcaggagttgccggaaaccgaactcgaccacttcagcggccacggcggcgccaagccggtgcgcatcggcaatgaagcgttcgaccagatccagctggatatctacggcgaactgatggacgcggtgtacctggtcaataaatacggcgaggccatctcccacgagggttggaaacacaccgtggaggtcgccgaccaggtctgcgaaatctggaacacccaggacgtgggcatctgggaaatgcgcggcgaagagcatcacttcctgcactcgcggctgatgtgctgggtggcgctggaccgcgcgatccgcctggcctccaagcgctcgctgcccgcgccgtttgcgcgctgggaccagacgcgccaggcgatctacgccgacatctggagcaacttctggaacgaagagcgtgggcattttgtgcagcacatcggcagcaccgcgctggacggttcgatgttgctgatgccactggtgcggttcgtagccgccaccgacccgcgctggttgtcgacactcgaagccatccagaaaagcctggtgcgcgacggcatggtctaccgctaccgtaacgacgacagccagatcgacggtctgcaaggcaccgaaggcgcgttcgccgcgtgctcgttctggtacgtcgaatgcctggcccgcgccggtcaagtggagaaagcccatctggaattcgaacaactgctgcgctacgccaacccactcggcctgtacgccgaggagttcgacagccaggcccgtcatttgggcaatacgccccaggccttgagccatttggcgttgatcagcgcagcgacctttctggaccgcaagcttagtggcgagaagaccacctggcaaccctgaggtggcctgtgcacaatgggcagcccctcgaagagtaacgggaagcccatgcgccaggtactgctgatcatcgacgtgcaacccagcttcaacccgcccgcgtggctggtcgacggcatcagcgccctgctcgggcgcctgccgtcggtggccaccgtggagcgtcacgacgaaagcatcacgcccttcgcccgccaactcggctggcaacccgcaccggatgaccacagcctgatcgcggcggatcgcctcttcatcaagcacggctacgcgccgacacctgcaaccattgagtacctcaaaagcctgacgccggagcgcgtgctggtgtgtggcattcagacggacacctgcgtgctggccgcgggctttgcgctgtttgatgcggggttgcagcccacgttgatcagcgacctgacggtagggtcgtcgctggatcggagcgggaaactgggcgtggacttgtggcggcatcatttcaagcacgtgctgagcagcgccgagctctttctagacaagtaagcctattgccttgaaccgcccccctccccgtcatcggtttgggctagagttccagctccatcggttaccccgtcagagcccgccatgacaacaactgtcccgctgctgtatgtccaaacgcccatgctcaatgtggcgtatgaaacccacggccccgacgacggtgagccggtgattctgctgcatggctttccgtatgacccgcgcggttatgacgagatcgccccggtgctggccgagcgtggctaccgggtattggtgccgtacctgcgcggttatggcccgacgcggttcatcaatgaacaggtgatgcgctccggccaacaggcggcgctggccaaggatttgctggacttcatggatgccttgtctatcccaaccgccacgctggcgggctttgactggggtggccgggctgcgtgcattgtcgcggcgctgtggccggagcgcgtgcgcgggctggtgaccggcgatggctataacattcagaacattgccaagtcgctgaaaccgcgggcgccagagacagagcatcggttgtggtaccagtactacttccatacccagcgcggcgtggacggtctgactgccaaccgccgcgagttctgcgaactgttatggcgcctgtggtcgcccacctgggccgaggggccaagcctgtatggcaagaccgcgccgtcgtttgataacccggactttgtcgaggtggtgatccactcgtatcgccatcgtttcatgtatgcccccggcgacccggcgctggagtccatcgaacaggccctgtcgctgcaaccgccaattacggtgccgagcatttcgttgtgcggcgccgatgacggcgtaggccctgcaccggtcgaggatgacgacgtggattgcttcagcggtgtgtaccgacgccaggtgttgcccggcgttggccacaatgttttccaggaggcgccgcacgtgacccttgaagcgctgtttgaactgctcgcctaggccaccggtgaaaaacgctcgcggtaggcctggggcgtcaccgacagggcgcgcaaaaaactgcggcgcagggtttcttcgcagccgaaaccgcactgcacggcaacgcgcttgatcgacgccgagctctccgccagttgccggcgcgccgcttcaacacggataagctccacagcgcgcgccggggtctggccggtttcggcgcggtagtggcgtacaaagctgcgctcgctcatgcaggcctgcgcggcaagggtcgggatgttgaggtccagcgtcaggttttccgccatccagctgtgcaagtcggcgaagcggctgtcgcccttttgcagggacaacgccacgctgaattgcgactgcccgcccgggcgtttgagaaaaaccaccagatgccgcgcgacttccagggcgaccgcgcggcccaggtcgtcctccaccagcgccaggcacaggtcgatgccggccgtgaccccggcggaggtccataccgcaccttgcctgatgaagatcgggttggcctccaccgtcagcgcaggaaacctgcgcgccagttcttcacagcgtgtccagtgggtggccacgcggcaaccgtcgagcaagccactggccgccaacaggaaggcgccggtgcagaccgaggccatgcgccgggtgtgtttggctttgtcgcgcacccactccaccagcgccgggtcttcagcggcgccatacacgccccagcctccggcgatcaccagggtgtcgcaaggcttgtcgacagcgggcagcggctcggccaccaacgccagcccggcggacgtcgtcaccggcgccgactgggcagcaatcaccgaaacggcataaggcagcggcaggccacgctggcggaacaggtcgttagtggatgcaaaaacctgcaacggcccggtcacgtcgagtacctgggcctgttcaaaagcgagtacgtgaatgagtcgaggcatgattggcgtgatttgtgggttcaatggcgtattcgccaaagcctaggcctctagagtgaagccgtccacccctttatcggagcttgattcatgaccttgcagatcggctttctgttgttccctggcatccagcaactggacctcaccggcccctatgacgtgctcggttcgctgcccgacgtgaaactgcatttggtgtggaaggacctggcgccggtcacgtccagtaccggccttaccttcacccccacgaccacctacgccgactgcccgaccctggatgtgatctgcgtacccggcggtgcaggtgtcggtgcgctgatggaagacccacccaccctcgagttcctcaagtcccaggccaacaccgcacgttacgtcacgtcggtatgcaccggctcgctggtactcggcgcggcgggcttgctgcgcgggcgcaaagccaccactcactgggcctaccacgacctgctcgcccccctcggtgcgatcccggtgcaggcgcgggtggtgcgcgacggcaacttgctgaccggtggcggcatcactgccgggatcgattttgccctgaccctggccgccgagttgtacagcgaggcggcggcgcaactggtgcagttgcagattgaatacgcgccggcgccgccgttcgactcgggcagcccggacactgcgcccaaacatgtactggaagaagcgcaaaaacgcacggtggaatcacgccgggtgcgcggtgaaatcgtggcacgggcggctgcgcggctgggttaacccgggtttcttgtggcgagcaagctcgctcaccacaaaggacgctttcaggcaggcctggacatcagggccaaacgcgccgccaacaccatcaacaccgtcgccaggccccattgctggagcctggcgctttgagcgtgcgcggcaaaaaaacggctgagcgcaccgccaaatagtcccagtattgcgtgaaacaccccggcaatcagcgtcagcacgccgcccaacaccagcagttgcacagtgatggacccggcttgcggcctgacaaactgcggcaggaacaccatgaagaacaacagcgctttggggttgagcaagctgttgaacagggcatgtgcaaacacctggctcagtcgtacccgcggggctttcgccacctccaggtcggggcacttttgcagggttttgtacaccagccacagcagatagaagatgcccgcatagcgaatgacatcaaaagatggcggccaaccggcaaccaatgccgtgaccccggaggccgtcaacacggtcagcagtacatccgccacgcagattcccaagctggacgccacaccaccgcgccatccataacggatgccatggctgatcacaaaggccatgttcggccccggcgataacagcaacaacaacacggcaccggaaaaaaccgccaaggtcgaaaagtcgatcatgttcacgccatccaccggaaaacctgaaggttaatcggcatggcccgggcaaacaaaaaattgtgctggatacattttcatgttccgtttcacagcaacttctctctcactcaacgctatatataacgggtacttagccacgctcgttattgcttttgtgtcccccttttcggcctctcgccgaaaaaggtttttcattcaaacaggaaaattctcacatttgttcctacactcaaaatcagacccattcaccgagtgcctgaacaaggaaagtcaataaaatgtcgaaaaaaagactgatcaacctgtctagcatgccacctccgcaccactgtcaattcattgactaagcaataccaaggaacactccttaagtcacgacccccgcacatttccttcatttggacagtttcatctggaagaaaaaagttgcgtattacccagcgtagccagtgttcgacatgcttcggattatgagtcgaacaaaaagcctggagtgcaatgagggatgtttttatgcgagagaagtcgtcagtcgacagcctgtttctgacccgtgccggttttgttgagttcttcgttgttttcgtcaagttggtccatggcctgactgcgattttgccgccattggttttggtgcttttcatcgatcccttggcccctgagctgcgcacccactttctcggcctgctgctgttttttgcgattctgaccattattctgtttcatgccatgggcatctactctgaagaactgttcagcaaccgcctgcgcctgcgctcgaaaaccgtggcctggtccgccgccttctgcatcctgctgttcatgtaccagattctgcagttcttcccgcagttgaccccccgcaacctggtgatgtggtacgtcgccactctggggttgctgtgcgtcgaacgcctggtgatgctgcgcctttaccgcaacctgatgcgcaagggcaaatacctgcaacgcacagtaatcctgggcttcaccgacaccgccgtgcacgtcgccgaccacctgcaacgcaatggcgatatccgctccggcctgatcggttttatcgacgaccgcaccgagcgcatccccaaggaactgagcaacctgcccctgctgggcaacacccgtgacctggaaaaactgatccgcgccgagcaggtcaaccaggtgatgatctgcctgccctgggctgccgagcagcgcattcacgggctggtcaaccgcctgcggcagatgtcggtgaacgtgatgctggtgcccgacatggccgccctgcgctacggccacagcaagattaccgatgtgggcggcatcctgatgttcaacacctcgcagctgccattgcgcggctggtcgccggtgatcaagcgctttgaagatttgctgctcgcaagcttcgccctcgtggcgctgtcgccggtgatgctggcgacagcgattgcgatcaagctcgactccaagggcccggtgctgtttcgccagaaccgctatggctacaacgacaacgagattcgcgtgttcaagttccgctcgatgttcaccgaacagagcgactttaccgccgaacagcaaaccacccgcaaagacccgcgcatcacccgtgtgggtcgcatcatccgcaaaaccagcatcgacgagttgccgcagctgttcaacgtgctgctgggcaacatgtccatggtcggcccgcgcccccacgccacagccaccaaagcggcgggcattccgtttgaagtggcggtgagcgaatacagctcgcggcaccgggtcaagccgggcatcaccggctgggcgcaaatcaacggttaccggggcgaaaccgacaccctgttcaagatccagaaacgtgtcgagtacgacctggagtacatatccaaatggtcggtgtggtttgacttgtacatcgttttcatgacggtcccggccgtcctttccaccaaggaagtctattgatgaacaccctcaacggattaattccctgcatcatttccggtggttcgggcacacggctgtggccggtgtcgcgccagaacatgcccaagcccttcatgcgcatgcgtgacggccagagcctgctgcagaaaactttccagcgcgccgccaaattaccgggggtggaaagcgtgctcacggtgaccaaccgcgacctgctgtttcgcacccttgacgactaccgtggcgtcaacaaggcccacctgcccctggacctgctgctcgaacccttcggccgcaacacggcggcagccatcgccgtggcggcgttgcacgtgcaggagcacttcggcgacgcggcccagttgctggtgatgccggccgaccatttgattctcaatgaagtggcgttcgcccaagccgtcaatgaagcccgtgacctcgccgaagccggctacctggtgaccttcggcatccagcccgaccacccggaaaccggcttcggctacatcgaaaaaggcgaagcgctgggcaccggcagccgggtcaaacgctttgtggagaagcccgacctggccaccgcccaggcctacctcgacggcggcaaacacctgtggaacgccgggatgttctgcttcaaggccagcaccctgatcgaagaactcgccacccacgcgcccgacgtgctggccgccgccagcgctgcgctggaacacagccagagcctgcaaaacaaaacctcgcgtcagcgcgagctgggcgcggatgcgttcggcagcgcaccagacatttccatcgacgtggcgctgatggagaaatccaaacaagtcgccgtagtgccctgcgacatcggctggagcgacatcggttcctgggaagccctgcgccagctcacccccagcgatgcccgtggcaaccagatcaacggtgaagcgatcttgcatgatgtacacaactgctacatcgactcgcccaaacgcgtgctcggcgccgtcggtgtgcgcgacctgatcatcgtcgacacgcccgacgcgctgctgatcgccgacgctcatcgcagccaggatgtgcgctacatcgttgccgaactcaagcgccagaaccatccggcgttcagcctgcaccgcaccgtcacccggccgtggggcacctacacggtgctggaggaaagcagccggttcaagatcaagcgcatcgtggtcaagccgcaagcgtcgttgtcgctgcagatgcatcaccaccgcagcgagcactgggtggtggtcagcggtgccgcgcaaatcaccaatggcgatcgcgaattcctgatcaacgccaacgagtccacctatattcccgccggacacaaacaccgcctgaccaaccccggcatcatcgacctggtcatgatcgaggtgcagagcggcgagtacctgggcgaagacgacatcgtgcgctttgacgacatctacgggcgtgcgcctgccgaagtgaagaaatgacatgcgcacttcgttgatcatcccgacccgcaacgcgtccagccacctgacgcggctgctgcctgcgctgaagatgcagacgctgcaaccggacgaaatgctggtggtcgacagtgcctccagcgacgacaccgtggcgcgctttcgcgagttcggcgcccgggtcgaggtgatcgatgcacgggaattcaaccacggcggcacgcggcgctgggccagcgagcaggtgagcggcgacgccctgatcgtgatgacccaggacgcgatcccggcagatcccgagaccttcgccaacttgctcgcggagttgcagcaagacccgctcaacggcgtcgcctatggccgccaactgccgcaccccgacgccggggtgctgggcgcgcagtcgcggcacttcaattacccggaccagggccgcagcaaacgcctggccgatgcgccggcgttggggatcaagacctgcttcagctccgactcgttttccgtgtaccgacgcagtgccttgcaggccgtgggcggctttcccgccgatgtgatcggcagcgaagacgcctacgtggccgcacgcatgctgcttgagggctacaccgtgcgttacgccgcctcggcgcgggtgtaccactcccacgattaccgactcatggatgagttccaccgctacttcgacattggcgtgttctacggtcgcgagccgtggattcgccaagcctttggcgatgccggcggtgaaggtaaacgctatgtactggctgagctcgcggcattacgcgcagccggtgcattgcaccgcgtacccgaagtcctggtgcgcagcgcgttcaagttgctcggctaccgcctgggccatctggaacgccgcctccccgtcgccctcaagcggcgcatcagcatgttccccggttattggaggtgagcatcatgacctacaggaagtcccccttgatgaaacgaaccttgctcgttgtggccatgctggccttggccgcctgcaatacccccgcccgcatcgtccgtccggacagccagtctgtcgaggatggcaagcgcgccctcgaacagttggcgcaactgccgcaggccgtggagcgcatccgcgtcggcgaccagctgcgcatcgtacgcgacgccggggagatgccgacactgtcggcgttcaacgtcagcaccatctacgagctgacgctgtacacggtgcaaaccgacggcaagatcaactatccgtttctggggccgatccaggtcgccggtcgccagccttcggagctggccaccgagctgagcaacaagctcgcaccggtctaccgcgagccgcgcgtgacggtgaacatcaaccaggcaccgggcaactcggtgatcgtcggcggcgcggtgaacaacccgacggcggtgcagatcggcacggccaacaccctggaacaagcgattgtcggcgccggcggggtcaacccttcgggtgatgccagcatggttgcgctgctgcgtgaagacacccaaggcgtgtatcgcgcttacttcctggacttcagccaatacctcaaacccggccccaacgggcgcaaatcggtgcgcctgcagcgcggagacgtggtgttcgtacccaaatccaacgtcggcgagcgcatccagggagtggatacctacttgaaccaattgatcccgttcaccaaatccattggggttggctacaactacaccaaaaccagcggcggcaataactaaaggagcgacatcccatgatcgagatccgttcttttcgtgatcttctgcgcctgttcttcatcttccggcacgagttcaagctggcggccatcgcggcgctggtgatcattctgctgggggccttcttgctgccggccaagtatgaatccaccgcgcgcctgctggtcaaaccagggcgtgattcgacgctgcccatcgaaatcagcaaccgccaggcgctggtcatgcccagcacccagcgcgacccgattgtcgacgaggagcgcctgctgaccggccgcccaatcgtgcgcacggtggctgagcattacctggaagccatcgaaaacgcgccgccaccggaaggcttctggaaacgtaccaagtactacatcaaggccggcgtcggcggggttttcgacggcatccgcgtggtactggaaaccgtcggcatcgtcgaaaaaaccacaccggtggaacgcctggcggcaagccttgagaagaacttcgaggtcagccacgccgtaggctccacggtgatggacatcagcttcaagtggggcgatccggaaattgcccaggccgtggtcaaggattggatcgaaacctacattaccgatcgcacccaggccctgggtcgcaagagcctgtatgcgttctatgaaggccaggtgaacaccagcgccaacgaaatcaagagctacaaggaacagatcctcacgcacttgaacgagatcggcgcagcgagcattaccgatcgcctggaagacttgtccgagcgcatcaacgtgctgcgcggcgagaccttcaataccacccgcctgatcgcttcttccgacagcgccatcgagagcacccgcacgcagctcaagacccagcccaaggaagtgacgaccgttcgccagatcgccttgaacccgcagcagcaggacttgcgtcgcctgctcaaccagaagctgctggaaaaggccgatatgatgcgcacctacaccgacaacgcgccgccggtcaaagcactggacgcctcgatccgcgcgatgcaggcgcaggtcgccagcgaaagcaacacggtacaaagctcggaaaaccgtgcgccgaacaccctggaaattcacttgcagcgggtgctgctggatgagtcgagcaacaacctggccctgcgtacccaactggttcagcaacagaaacagctggtcaacctggaagcgcagcgcaagcaggcgctggagatcgagccggaactggcccgcctttcccgcgagctgagcgccaccgagcgcaactacgcgctgtacgtggacaacctggaaaaatcacgcatcgaccgcgagctggacaacagccagatcagcaacatcgccgtgatcgaagaggccaccctgaacccgggccgcatcttccccaaaaccctgttgatgctggtgctggcggtcccgtttgccatcgtcgtcggcttgctggtgatctacctgtgctacctgctcgaccagcgcattcacgatggcggcctggtggaacgcaagttcggcctgccgctgtggactacgttgccggagctggacaccagcaccgcgcaaagcaccaacgcgttcaatgcgagcatctaccggctatacagcttgctgcagccggaccgcatcgccgagcaaggcctgaccctcgggctgacctcggcgcgccacggcgaaggggtgacctttgtggtggaacaactgcgccagttgctgcaggagaacggcatcaacgtgcgcgttggcggcctcgccagcgctgagcctggcgaagtggtcctgctggacgcttcggcattgctggacaaccgcgatgcgttcatcaccctgcgccgtgccgacctcattgcgctggtggtggaagcgcagcacagcacggtgccggtggtggaacatgcgctgtcgatcctcaacaccgcgtttggcaaagtggacggcatcatcatcaaccggcgcaaattcgaagtgccggccaaggtgctccaaaccatcgccaagtaccggggggcgttctgatgcgcatcgccctgctcgcgcctctgccgccggagaaaaacgggatcgccgactacgcgaaccatttcaaggcggccctggagcaagcgggcgtgacggtggcgacaccgttgagcggtgtggacggcaacagcgtggcgatcaaacacgccatcagccgcttcgactggcagagcgtagacctggtccacgccgagctgggcggcgggcggctgggggagttcctggcgttgcgcgagctgcgcaaggcgtatcccagcctgccgttgaccgccaccgtgcatgacccggagcgcatcgtgtggcggcgcgaacagctgccctttccattgaacctgctggagcgcttgccgagcccgctgccccaggcggcggtggtgctggccgacccgctgactctgcgcgaagagcgccaggtcgccaagggcctgacgcgcttgatcaccctcacccgcctcggtgccgagtgcctcaccgagcgcatgcacctgccggcgggcaaagtggcggtgatcaaccacgccaacctggccattgcgccagccccgttgccgccgctggacaccctgcacctgctatatttcggttttatctaccgtggcaaaggcattgaagacctgttgcaggccctcgccaccgtcttcaagcaagcccccgaattgcgtgaccgtgtgcgcctgaccctggccggtggcactgccgccgaaatggcgtttggcgcaggcggcaattacttggaacacctcaaccgccagatcgccgacctcggcctggaaggcgtcatcgactggcggctgaatctgccggcgggcgaaatcgcccagacgatccaggcgcaccatgtgatggtgttgccctatcgcgaatcaaaaaagctcggcctgctggggcgccagcgtggtaccagtggcgcgctgtcctgggccgctgcgtgtggtcgcggggctattacctcaaatgcccgggcctttgccgaagaggtcgccagcggtaacggggcgatttacccggaaggcgatgtgcaagcgctgagtgaacaactgctgcgcctggcacgcacaccctcactggcgcgggactgggccgagcgcgccggggaaattggccgtgaacgcctgtggccgctgaccgcgcagaagttcaagcagctctttgagcaggcgattgcgggagcttcttatggcgcgtagacgtacctatttcgccaccctcgcggtggtcgccgccctgggcctgaccgcctttatgtggggccgccaggccgacgccgagaaccatgtgctcaaaggtaacaaggtggtggtgtggaaggattttctgggggtgaacgcgcagtttttgtggttcagccccacgctgtatcaacagcagatcgacaaactcaaagcgctgggccttgagtgggtgcgcctggatttgcactgggaccaactggagccggtgcagggccaataccagatcgcgaccctggatcagttggtcggcaacctgcaaaccaaccagctcaaatccgtgttctacctggtgggttcggcgcccttcgccaccactgcgccggcgggcgcgccctatcaggaccagtacccgccgcaagacccgaacctgttcgccaaccgcatggcgttgctggcccagcgttatcccagcgtggacgcctggcaggtgtggaacgagcccaacctgctcggcttctggcgcccggtggccgacccagccggctacgcgaccctgttgaccgccactgccaatgccctgcgcgcggtgaacccgagcaagccggtggtcgcggcgggcatggcgtttttcagtgaaatgcccaacggccagaccatgttcgatgcgctgggtgcgctcggcgtggccagcctgaacaccacgatttcctatcacccctacacccagttgcccgaaggcaacgacccggccaacctcgactttatcgccaagaccaccgcgctcaaccaggcattgcgcggcggcggtgtgcaaaccctgtggagcaccgagtggggctggtcaacctacaccggccccaaagacgcccaggacatcatcacccagcaaggccaggctgattacatcgtgcgccgcgtcgcgctgatgagtgcgatggattacgacaagattttcctgttcaccttgagcgacctcgaccagcgcgccagcgtgcgtgaccagtcctatggcttgctcgatatcgacgccaaccccaagccgtcctacaccgcgctgaagaacttcctcgacaccaccgggccacagctcacaccgggcgacccgccggttgccgaccaactgcccgacggcctgttcagcatcggctggacccgcgccgacggccacaagctgtggttcttctggtcggcccagggcggcaacgcgcatttgccgaacctgagcagcgccaccctgtacgacccgttgcgcggcacgcaaaccccggtgagtggcaccaacggcctgaccgtaccggtcaagtcgaacctgcaaattctgctatgggattagagcccgccatgcgcattttatggatcctgccctactcgccctggcccgccaccagcggcggcaagacgcgccagttccatttgctgcgcagtctggccgcgcgcgggcaccgcatcaccttgctgctgcatgacaaacacccggtgtcactgaccgaccgccaggtgctggaaagcttcgttgaacaattgatcatcctgccacgccgcccgttgcgcagcctgaaaaccctgatggccgggttgtttgcgccctacccgctgctggccagcgtgaacggcctgtcgggcgagttgcaggacaccttcaatcaactgctcaatgagcattgggacgtggtgcagatcgaacacacctacaccttccagccatatgaagacgcgctggcgcgcaaatcccagccgtttgtgctgaccgaacataatgttgagtcggccctcggcgcggccacctacgaccgcctgccacgctgggcactgccgttcattcgctacgatcaatggcgctatagccgctgggaacaccgcgtgatgcgccaggccacccaagtggtggcggtcaccgacagcgacgcccaggtgctggaaaaaatcgccggcaaaccggtgccggtggtggtcaatggcgtggactgcgatcacttcgccggcgcccaccctgacccttcgacccgccgcattctgtttctgggcaactacgaatacgcgcccaacgtggacgctatcgaatgggcgctggatgaaatcctgcccaaggtctgggaacgctgcccggatgcgcgcatgagtgtgtgcgggttcggcatgcccggcagctggcgcgagcgctggaaagatccgcgcatcgaatggcaaggctttgtgccgaacctgttgaacctgcaatcgagctgttcggtattcctggcaccactgcgccatggcggcggctccaagctcaaagtgctggaggccctggccgccgggctgccgttggccagcaccgagcaaggcgtgtcgggcctggacctgatcgaaggcctggactacctcggcggccaaaccgccaccgggctggccgacgccgtcgtgcgcctgctgcaatttcccgaggctgccgcgcccatgggggaagccggccgcgcctatgtacgccgcgcccatgactggagcgtggccgccagccagctggagcaggtgtacgcgacgctggcgccgctcaatcaaaaggagcccgcatgcgtataggcctggattaccgcaccgtcggcacctcgccgcaatcggggatcagccgccaggtctacgcactggaagatgccctgcgcagcctgccgggcatcgagcttgagcgatttaccgtcgcgccgctgggcgacgaaacccggctgcaggcccactgcccggcctggggctgcgcgaagaccgcgatgcaccagccgcacaaccgtgtgcgcttcgaggccggctttctgccgcgtgcgttgcgcgagcagcacattgatgtgtacatcagcaccttcaatatgggcctgccgctgccgcccaaacccaaggggttgcgcaccgtggtgctgctgcatgacctgtttcagatcaccttgaacaactaccacgccaaccgcctcaaggcgctgatctacaagaccagcgatcgcctgtcgattgcttacgcggtgcacagcgccgaccgcgtgtggacgccctcgcagtacagcgccgacgagactgggcggctgttccccaaagcggcgggcaaggtgcgcgtgctgcccaatcaggtcgaaggttttgtcgggctggcggcagacctctcggcgcgccaattgccggaacgttactggctgctggtgggcacccgcgaactgcgcaagaacgtgccgtttctggtggatgcctggcagcaggcgcggcggctatcaccccaggtcccggagttggtgctggtcggcagccttgagcacttgcccgaagcccaacgcagcctgccgggaattcgcgccttgagcggtgtgtcggacgctcaattgcaggcgctgtaccgccaggctttgcgcctgtggcaaccgtcgtatgccgaaggctttggcttgccggtgatcgaagccctcagcgtgggcacgccggtcgcggtcgccagcggcacctcgctggatgaaatcaccccgccgtcggcaccgcgcttttcacccaccgatggcccggcgctggtgcagttgatgacgcgcctggccgagcgctccgtagaagaatccgccgagcactgccggcagtgggcggaacgtttcaatcaacacgcctatcgccagcgcctggctgaactgatcgaggaattgcaatgagagtttccctggccagcctggttgccgtcctcttcggcctgttgttcggtgccctggccttgctgctgtcaccggccaaggcctttctcgcagtgatcggcctcgcggcggcggtgaccatcctgcgctttccgctgtggggtttgctgctgttcgcgctggttgcgaccttcatgccctactcgaccgtcaacctgggcattcgcagtaccgtgagcgaagccatactggcgctgacctggggcgcggtactgtggcacaacttcctcgcacgcctgccggatacgccacgcctggcgcgtcgccccaccgaccagatgctgctgtggctgatgctgttcagcgtgttcccgtttatcgtcggccaggtgaccatccacgccgacaccagtggcgtggccaactggctgcgctggttgctgagcctgtcggcggtgtttctctgcgccaagttgctggctgactacaagcaccgcgaatccctggtgatcgccctgttgctgggcaccctggcgatgctggtgctgtcgatcgccgtgtttatccgcacacgctcgggcgcgggcatcgcaccgattctggcggtgttcaactacggcaacttcgacatgctcaaattcggtcttgaggcgatggcttcacgcatgggctcgccgtggatgcacccgaatgccatcggcgggatcatggcgttgctgctgcccttggcgttctgcttcggcatgaccgaacagggttggaagcgcgcgctgggcctgggcgtggcgtgccttggcgcagccgcattactgctggccagtagccgtggcgcgatggtcagcctggcgttggtgctgatgtggatggccacgcggcgcgtgccgtacaccgggcgtttgttgatgatcggcgcggcactgaccgtggcgctggtgatggcttacccgccgctgcaggaccggctggcgacaattttctcctcggacaacgccagtaccgaagtgcgttttgacgaataccgcatgttcccgcaggcggtggcggcctacccgttcggcattggtttcaaggtcgatccgccggtgcccggcacgcacttgctgggcatttccaacctgtggctgaacttcatctacaagaccggcattgtcggcatgctgctgtttgtggccgtgacggtacgttggtggcgcgaagcccgcccggaaaaaggcccgatccgcctgaccaaggacaacgcactgtggctgggcagcaccgccgggattctcgcggcgctggtgagcggtttgtttgaccactatttcagttttgcggtggtgatggttgcgctgttctggctgatggtcggcctcaatgtgctggaggcgcggcgtctgtttccggcacgcctgccgcaggtcaaggcggtggtgtttcgcaagcccctccttgacggcgcgcggccttagccatgctgggctccgccgtctggctgaccctggcgaccctgctcggcctgtgcctggggttcgctcgcgagtggttgctggtggcggcgtggggcgcgggagagcgcagtgacgccttcctgatcgcgttgtttttgcccgaggcgttgcgcatgtcattggccggcggcgtgctgagcgctgccgcactgccgctgtacctgcaacgcaaagagggcgagcggctggactggctggcggtgttgttccccgccttgctgctgatcgccctggccaccagcctgttgctggcgctgttggcgccgtggctggtgcaactgctcggcccgggcttggccgccagcgccacaacgttggcggcgagcaatttgcagatcgtggcgtggtgcgtgccgggcttgatgctgcatgcgctgttcagtattccgctgcaggccagcgaacggtttgtgctggcgggtttgggctcgctgttgttcaacctgccgccggtgacttacctcgcactcgctggcactgccactcaaccgcactccctggcgttggcgtgcctggccggcagcctgttgatgccgttggcgctgctgccgtcgatctggcatcaaggctggcggccatggcgctggcagttgagcgttgcgccgttgcgcgagctgggccaacgcatcggcccgctgttgctgagcaatggcgccagccaagggttggccttgatcgaacggttggtggcgtcgctgctgggtgaaggcgcagtgacttgggtcaacctcgcccgcaagttgatgaacctgccactgattgcactgatgagcctcaaccaggtgctgctgggcatgatgagccgccgccagggcgatgagcgcctggccctgctcaggcgtggcctggaaacggccagcgtgctgacgctgccggccggtgtcgggctggtggcggctgcaccgagcctggtggcgttgttgctgcccaagcagtcggccgattcgccattgccgctgctgttggcgtggttcgccgtgcccttggtattcggcgcgtggaacgccttgctcgcgcgttacgcctacgccgccggcgatacgcgccagccgttgcgctgcgagctgttgggcagtctggtcaacgtgttgttgctgggcgccctgcccttcgtgttcggcctggcgggtatcccgctggcggccttggcgggtgtgatctgcaccgcgctgttgctgatgcagcgccaatcgctgctaggcgacctgccctgggcgcggcactgggcgctcagtgcgctggtgatggggctggcggcgctggggctgttccggattgaaggtgtgtggctgcaactggggctgagtaccctggcaggcgctgtggtgttgctgggcatggggctgtggctgaagccgtggcgcaaggcatgaatgggcaagcgagggtgatcaggtgaaacatcgttggattcaaatggacatcgccaggggcatcggcatcctggtgatcgtgtatgcccacagctggttcgtcgccacgtccccggacttgatgtacccgattctggcgtcgttcatcttgccgctgttcttctttctgtccggggtgttgttcaagcccgaacagccgtttgtggagatggcgatacgcaaggcggatggcctgctcaaaccgtttttcttcaccatgctgctctacgtgatcgtgcgcgccctgctgcgcgggcaaccgttgttgccggatatcggcggcgtgctgtatgcctcggtggacaccattccctggcaggccatgtggttcttgccgcacttctgggtggcaattctgttcagttgggtaatgctgcgcttgatccagcgcctgaagctgccactgtgggcgagcgggcttctgatggtcgtgcagttgctgatcggcatctggatactgccgctgttctggcaactgccggtgaccattgccgggcaaaacagggtgttgccggggctgccgttcagcctggatatcacgttgatcagcagcatgtatttcattgtcggctacctgctgcgcgactggctgcgcacccacgcgggttcgtggctgacgttgctgatctcggtgctgttatttgccgccgtattcatcccgacctgggccaccatggacctggcgcaacggcgctacgatcattggttgtggaccagcctgttggcggtgattggcgtgtacgcctgctgggcgctggccaaggtgctgatggtctcggcccttgtgacgcgggcgatgacctacattggccagtccacgctgatcctgttgatcttccacggcgagattcagcacaagaccttcgacctgatggagcgtctgggcctgcccccgttcctggcggcctgtgtggggctggtggtggcagtggtggtgccgttgttgatcggggaggtgatcaagcgggtggcgtttttgcggtttttctactttccgtttccggtgcgtaaagcgcctaaaacttgaacacactgcggccctctgtgggagccgggcttgcccgcgatggcggcgtatcagcgacagaatatttggctgatacaccgtcatcgcgggcaagcccgctcccacaggggttatgtatttttaatcatcgagttgcgcaggcgctggtttgctgccgggtttggctggctttgcaacttttgcgcccttggctggcgccgccgcagcgggctctggctcggccggggccgcgaggtctttctcagcctggggcatctggtcgatggcgctgaaaaagtctttcaggtcgaggctatccggtggcacggtcttctcgagtttcttctcgccatccttgcccaccaggatcactttggtgccgctgccggcgccgagcttcagggcgcgaatcagcgcgttggtctcaggtggcgtgagcttcttgttgtccttcgcctccttcgcaaatttttccccttccgctccgatactgccgaacttcacggtgtagaacaccatgctgcgctcttcaaaggcctgcttgttggcaggctcgtccaattgcttctggagggtcgcgagggtggagttgccggaatccagttccaccactaccaacgggcgggctttgcccaaatcctgcttgagcgggttgatatcatcagcggccaacagcggccccgtaaaagccatcaaggtagccagggtcagcgaccggatgagcatgcgcacctcctttgaattccatgcagggttcttgagtttcatgtgtgcgacagtcaaattcaaggatgattcctgcgcgactttaagaaagcgtaggtcaggacgcccgctacgcaagggtttggtccggttcaatcgttattgtttccactgattgcacaaacatcatgagacgttccaatccggccaatgccgtgcgaacacaggggccacgacagggtccgcgtccacctgtgccagggtctgggcaaagctcggcgccagcgcacttaacacctcgcgcgcctcatcccaacgcgacacggccgccgccatgatacccagcgcattcggcacagcgtcgggcgcgaacaactggtcagcaaattgatcggcaaacaccacccaggcctgatgcagataccggcgcgtgccggtggtcaattgcgcctgcaccgtttggtcagcctcgcccagccagcgttgcgggtagtcgatgatgccgatggccgagtagcaattggcggcgatgtacaccaggcctctgatgatctgcccacggttgccggccaataacgcggacgcgggaaacgtcaggccaaggtggatcaggatcgccgcgctttcggtcagcacctcgccgttgggggtcaccagcgtgggaatctgtttgagcgggttgatctgcgccagggcttcgctgcccgcggtgtcttcccaggaactggcgtcgatttgctgccactgcacgccacaacgctgcagggcgatttcgatcatgcaggagccggactcgtcggtgccataaagcgtgtacatggggcgttcctcctagcgctgcagtttggcctgcaagctggccttcacctgcggccattccgaatcgatgatgctgaagcgcaccgagttgcgcttgcgcccgtcgggcatgatgcgctcgtggcgcacgatgccttcctgcacggcgccgaggcgcaggatcgcagcgcgggatttttcgttgagttcatcggtggtgaattgcacccgcacgcagtcaagcacttcgaaggcgtacgtcagcaacaacaacttggcctcggtgttgatcccgcttttctgggtggattgcgccagccaggtgtggccgatttccagcttgcggttgacccggtcgactttccagaaacgcgtgctgcccaccacctggccggtatctcggcgcacgagggtgaacgggatgacagtaccggcctcgcgcccggccaaggcggtgtcgatgtattgatcgacggtggccgggccgggcacgttggtgactttcaggttccacagctcgccgtcggcggcagcctcgagcaaggcggccgcgtgttcgcgttgcaggggaaggagttcgacttgagtgccggtcagggtgatctgggtcatggagcgctgcgccgtctgaggtggtcgtcagtggcctagagtgcaggctcccaccgtacctgggcaagcgttttagaacaggcccatttgcccgccgaccagggtggagaaatcatcattcacaaacggcaggatcgcgtcggccaccggctgcaattgcttagtcacgtagtggtcgtagtcgatcggtgcctggcgcacctcaagcggctcggggccgttgacgctgatcacgtagctgatccagccgccacgctggtactggcgcgggcgccccaggcggtcgttgtagtcgtcggccaggcgcgcggcgcgcacgtggggcgggacattgcgttcgtagtcgtcgagccgacggcgcaggcgcttgcggtagatcagcaggtcgtcgagttcgccgctcagggtgcggcgcacgtagtcacggatgtaatcctgatggggctggcggtggaagatgcgctggtaaagctcctgctggaattgccgggccaggggcgaccagtcgctgcgcacggtttccaggcccttgtagaccatttcctcgctgccatcgccgcgcaccaccaggcctgcatagcgtttcttgctgccctcctccgcgccgcgaatggtcggcatcaggaaacggctgaagtgggtttcgtattgcaattcaagggcgctttgcaggccgaacgcgttctgcaaatgcgcgcgccaccaatcgttgacgtgctgcaccaacgcgcggccgatacggctggcgtcttccccggaatgggcgctgccgagccagacgaaggtggagtcggtatcgccgtagatcacttcgtagccctgcgcctcaaccagctcgcgggtctggcgcatgatctgatggccgcgcatcgtgatcgaggacgccaggcgtgtatcgaagaaccggcaaccgctggagccgagcacgccgtagaaggcgttcatgatgattttcagggcttgggacagcggcgcattgtgctcgcgcttggcggcttcgcggccctcggacacgcgggtgacgatggacggcaggcagtgacgggtgcgggagaaacgtgcgccgcgaaagccttccacggacgcgctgtcgtcggggtgtttgaggccttcgatcaggcccaccgggtcgatcaggaagctgcggatgatcgacgggtaaagacttttgtagtccagcaccagcaccgattcatagaggccggggcgcgagtccatcacgaagccgccggggctggcctggggcggtttgtcgcccaggttcggcgcgacgaaaccctggcggtgcatcaacggcatgtacaggtgggtgaacgcggcgacggaaccgccgctgcggtcggccggcaagcccgtgacgctggcccgttccagcaggaacttgagcagttcggtcttttcgaaaatccgcgtgaccagctcgcagtccttgaggttgtagcgcgccagggcgggtttgtcctcggcgaacatgcggttgatttcgtccatgcgctgatacggcgtggaaatgtccttgccttcgccgagcaaggtttgcgcgacgttttccaggctgaaggattcgaaactccaggtggccgaacgcagggcttcgatgccgtcgatgatcaaccgccccgccgctgccgcgaagtagtgattgcggctgccgtgttcgcgccaggccatgggttcgtcaccacgcccgagcatcagcggcacgttgaggcgctgggcgtgttcgtggagcacgcgcaggtcgaactgcaccacattccagccaatgatcgcgtcgggatcatgggtggcgagccattcattgaggcgttcgagcaattgcgcgcgggtgtcgcagtagtcgagtttgaagtccaccgcgtcggttttgttcggcgggccgagcatgtacacctggcgttcgccgcagccttcgagggcgatggaatagagatcgccctgggcggtggtctcgatatccagtgacaccagtttcagcggcgggcggtagtcggggtcgggtttcatctgcgcgtcgcacagcacaccgctggcatccggcgtgccgccgaaccacaccggcgcggtgatgaagcgctccatcatgtagcgctcgggcgggcgcacatcgccttcgtagacatccaccccggccgcgcgcaggcgtttttccacgtccatcgcctggcggtgctggcgggtgtacaggcccaggacgggccggtgatggaagtcgcacagctgcaacgggcgcagttcgacatcacgctcgcccttgagcagccagtcgagcggcttgcgatgggcctccggaatgaacatcaccgaggtctgcacaggtaggcgaataaacctcgggcccttgtcggtggccagccagaaactgacctccgtgcccgctggcgtgtcacgccaatgccgggtcaggacaaaaccctgctgtaaatccaccgtaccgcacctcaggaatcgctttcagggcgtgattctactcggcatccaggcaaacgcggcaggtaaacgcgcgcacagacctcaatccgataattttgttgcaaaacattaataacaatcactatcatttgcgtcggagtcgtacctgcgcagcgaggacgcgcaaccgccgttgcccttttcctcacgttgacggctcgccgtcaggattgaccatgcccacccgactttccgtgccgtttcgccccaccctgctcgccctttgctgctccctgggcgtcagcgctcacgccgcaaccccagccaccccgcaggatgcgaacacccgtcaggacggcaacacactggaattgggcgccaccaacatcaacgccgacgcccccacgccaaatgccctgcccccggtgtacgccggcggccaggtggcgcgcggtggccaactgggtgtgctgggcaaccaagacatcatggacgtgcctttcagcatgacggcttacaccgaaaaattgattcgtgaccagcaggccgagaacatcggcgatgtgttgcttaatgattcatccgtgcgccaggcgtcggggttttccaaccaggcccaggcgttcgtgatccgtggcctgccgctcaacggtgatgacatttccctcaacggtttgtacggcatcctgccgcgccagatcatgtccaccgacgcgctggagcgcgtggaagtgttcaagggccccaacgcttttatcaacggcgtcacgccgggtggttccggcatcggcggcggtgtgaacctgcaactcaagcgcgccgatgatgcgccactgcggcgcttcagcaccgacatcagcaatgatggcagggtcggcgaacacctggacgtcggccagcgttttggcgaagacaaccgttttggtgcgcgggtgaacatttcccaacgcgaaggcgacaccggcgtggacgatgaaagccagcgttcgaagctgttttccatcggcctggattatcgcggcgatgcactgcgggtatccggcgactttgtgtatcagaaacagcaggtcaacggtgggcgtaacacggtgctgctcggcagcggcctgacacatattcccaatgcgccgtcggccgataccaattatgcgccgaactggggtaccaccagcctcgaagacaccttcggcatgctgcgtggcgagtacgacctcaacgataactggaccgcctacgtcgccggcggcgccaagcacaccaatgaaatcgggcgttactcctccgtcaccctgaacgatgcgttgggcaatgccaccgtcagcggctcgcatatcgctcaccaggaagacaacaccagcctgatggctggcctgaacggcaagttccagaccggtgcggtcagccataaactgaacctgggcctgaccggcatctggacccagacccgcaatgcttttgattttgcctcgggcagccagcccaccaatatttataaccccgccgacgtgagcgccccggccaaaggtggctttacctccggcagcgacctgaacgaccccggcatcaccgccaaaactttcgctcgcagtgcagcggtctcggacaccctgggtttcatggatgaccgattgctgttcaccgccggcctgcgccgacaggagctggtcgtgcagggctacgcctatgggaccggcatacgcaatgccaactacgacaagggcattaccacgccggtgtatggcctggtgttcaagccgtgggaccatgtgtcgttctacgccaaccatatcgagggcctggcttcagggccgactgcaccgacaaccttcggcggcgcagtcgtgagcaacgccaaccagaccttcgcccctgcccgctcgaaacagaccgaggccggtgtgaaagtcgacatgggcacttatggggcaacactgggtgtgtaccggatcgagcaaccgacccagggttattcccagctgaatgccggaggtggcgcgacgtttgtgttccagggtgagcaagtcaacaaaggcgtagaactgaacgtcttcggtgaaccggtcagcggcctgcgcctgctgggcggcgcgacaatcattcataccgaagtcaatggcacccaaaacggcgcgaatgacggtaaccgcgcaatcggcgtgccatcgttccagcttaacgccggggtggattgggacgtgcccggcctgcaaggcgtgagcgtcaacgggcggatgctgcgcaccggcggccagtacgccgacgcggcaaacaacctgagcctgccgacctggaaccgtttcgatgtgggcgcacgctacaacttcaaggttgatcagcgtgatgtaacgctgggcgcgaccgtggagaacgtggggaacaccaagtattgggagtcggcgctgggtggctatctgacccagggcgatccacgtgtggccaagttgtcggcaacaatagatttctaaccgcgtcatctgctggcgggtcagcgcatttgcgcatcgctgactcgccactagactcatggcttctctcacatggaagtcacctcaatgaagctcacccgcaccttgcgccaggctgtcgccttggccaccctgctgtccgtcagcaacctcgccgcttacgctgccgatatcccgttgtccaaatccctggaagccgatgaagtgaccaccaaggtgttgtcggtcgatgccgccaaccaccaggtggtgctggcaggcgcccagggcaacccggtgcatgtacaactgagcgatgacgccaaggacctgggcaacctcaaggtgggcgatcaagtgaaggtgctgaccacccactcggtagccgccgtactcgacaccgatgtggacaagagcgccccggactccagcgagaaaacgggcgtgctgcgtgccaccgccgacaacccgaaccccggcggtgcagcatttcgccaggtgcaggtgcaactgaagatcacccatatcgacctgaagaaaaaccaggtcaccctggaaaacccgaccggcgcgaccaaggtgctgaacgttgaaaaaccggagatccgtgccgggctcaaagacctgaaggtcgggcagagtgtgctggtgaccttcaccgacaccctggaaatcaccacggcccacgaaggctgacggtaaggaagacgggcatcggcaagatgcccgttcggttcaggcgcgacgagcctggttgagataggtttcaatgttgcccatttgctcatcccagccgcgggaattcatcttgaaggctttctgccggcgagcctcggggacggcatcaaagccggattcaaccacccgcagcaaaatgcccggcgcgcgatcctcaagggtgaactccaccagcgtgggtgtttcgttgtcgtagtcgacaccggcctcaaccgcgtaagggtgccacaggaatgaaaacagggtttgcggcaggatgcgcacgattttggctttccagaccacatgctcgtagccggggtaggttatcggtgcctcgagggtttcccctgccgtgaaggttttgcctttgagggcgataccaaaccaactgccgaattgctcagcgtcggtcagcgcttcccagatgtgtttacgtgatgcgttgagcaggacttttcgttcgatgcgatctagtacgtgcataagtcacctcctccattgacagtaggcgacatcgaccaatgcgcaactctggtgtctgcgcgatgatgatgaccccatccttgaactggcaatacgttatgactgacccgttgaatggaagttgcttctgtcgcgccgtgcgttatcaggtggatagcctggacatgcccatcagccattgtcactgcaacagctgccgcaaggtgcatgccgccgcgttcgtggccacggccggcgtgatgcgcgagcactttcactggattgaaggtgaggcgctgttgtcgtcctttgaatcgtcaccgggcaaacaccggcatttctgctcgcgttgcggctcacagttgatggcggagcgcgagcatcagccccacgtgattgtgcgggtggcgacgctggatgatgatccgggcatcaggcccacctcgcacatctggaccgcccatgatgtgccatggctggcacatgaaggcgttgaacagtgggacgagtggaaggcctgagtcaaacgtgcgggtcaccgggcgctttggctggcgtcgcatattgcggcttcaaatggccgtcctggtcgagcaaccaggcgtccatgatctgccgcaccacagggcccgcgacccgaccaccggcctcaccgttttcgatcatcaccgagatcacgattttggggtgctcggccggcgcgaagccaacaaacaaggcgttgtcgcgatggcgctccagcgtcttgttacggttgtaacgctcaccctgcttgatcgcgaccacctgcgccgtaccactcttgccggcaatccggtattgcgcgccttgcgctgccgcccgagcaatgccgcgcgggtcgtgcatcaccagctgcatgccgtggttgacctgttcccaatcgcgcgggtctttgaggactacgttgggcatcgggttttcgtccaccggcggtacaccgttgatggtcttggccagatgcggccggttccacacgcctttattggcgatcaaggccgttgcctgggccagttgcagcggcgtgacctgcatataaccctggccaatgcccaggatcacggtttcacccgggaaccagggttggcggcgtgtcgcgcgcttccaggcttgggagggcatcaggccggctgattcttcaaacatgtcgagggagactttctggccgaggccgaattcggccaaatagtcatgcagacggtcgatgccgagcttgtgggccaggtcgtaaaaataggtgtcgttggagcgcatgatggccgcgtccatgtccacccagccgtcgccactgtggttccagttgcgatacttgtggtcgaaatcaggcaactggtagtaaccggggtcgaacacccggctttgggcggtgacgacgccactgtccagaccagcaatggcgacttcaggcttgatggtcgaaccgggcgcgtagagcccgcgcaggacgcggttgaacagcggccgatcgatggagtcgtgcagcgcggcgtattccttgaagctgatgccggtgacgaacatgttcggatcaaaactcggcttgctgaccatggccagtacttcgccagtctgcgggtcgagggcgaccaccgagccacgacgatcgcccaaggcctcttcagcagcttcctggagatggacgtcgaggctcaatacaatgtttttacccggaaccgggtcagtgtgcttgagcacgcgcaatacacggccctgggcattggtctcgacctcttcataacccacgtggccatgcaattcggactcgtagaaccgctcgataccggtcttgccgatcgactgggtaccgcgatattcaacggaatcgagggccttggactctttttcattgatacggccaacgtagccgatcgaatgggcaaaatgcgcacccagtggataatgacgaacgaattgcggttcgacgtcgacgcctggcaggcggaactcgttgacggccagaacagcgatctgttcctcggtcagctcataaaacaacgtgacgggaacgaaagggtggcgcgcctgttttagcgccttgtcgaacaccgcacggtcttcggcgggcaggtgcagcaggttgacgatagcgtccagctcgcctttgaggtcagtcgtgcgttcgcgggtgatcgtcaggttgtaactggggcggttgtcagccagcaccacgccattacggtcgtagatcaacccacgggtcggcgtgatcggcaagacgtggacacggttattctcggaaatcgtcgagtgatagtcgtactgcaccacttgcaggaaatacatgcggcccaccagcgcgcaggtgatgccgatcaccagcagtgcgcacgcgagcaggcgcttgttgaccaggcggttttctttttcgtgatccttgatcggtatcggttcaggcatttctacagcatctcgttgaagaaggtcgacgccgcgtcctgcggatgaaagatcaatccttgtgaaaatgtgctgcaccataccaaaaatgcagaaacactttgcatcgatttccccaacggcatgctgttttgtcaggagagaacggatttcggttccagaaaggcttccaaaccgaaggtaccgtactctcggccgatgcctgactgtttaaacccgccgaaaggagcgcgtggttcgtgggccagcgtattgatcagtacgcggcctgcttcgatgttcgcggccaatgcgcgggctctttgtgggtctgatgtcagaatataggcctgtaggccgtaaggggtgtcgttggcaatcgtcaacgcttcatcttcgtcgttatacgtaatgatcgacaacacaggaccgaagatttcctcacgggcaatggtcatctggttggtgacgcggctaaagatggtgggcctggtgaaccaaccggccgcaataccttcaggtaacccggtgccgcctgccagtaagtgggcgccctcttcgataccgacctgaatgtatcgctgaacccgttgccattgcttgaagctgaccatcgggccgacgctggtaaccgggtcattgggatcacccgcacggatatgggcaacttcctgaaccatcagcgcttcaatttcggccaagcggtgcgcagggacgaggatgcgtgtaccggcaatgcaggcttggccgctgttcataaagcccgcttgaagtgccatgggtatggctttgctcaggtcggcatcatcgagtatcaacacgggcgacttgccacccaactccagcgttatgcgcttcagggtttcagcccctgcccgcaggatgtgtttacccacggcagtagaaccagtgaacgaaactttggcgatgtccgggtgcgtactcagcacgccccctacagtttcgccacgccctgtaacaatgttaaagacacctggaggaaggccagcttcgtgcagggcccgcgtgacgatagaggtttgcagagcgctcatctcactcggtttgatcaccgctgtacaaccggcagccaacgccgcagccagttttccacagataaagccggcattgctgttccagggcgtgatcaggccggcgacacccaagggctgcattgtgacgcgggcaatgccgacctgatgcgtgaagtcatagtcttccagcaccgaggcagcctcgcttaaaacgctcgctgcatgcttggccatccaggatgcccgggagataggcgcgccgtattcttcaatgatggcctcagtgagttctgtctctatggatgcaatggctgcatgcatgcgtttgaggtgatcaacacgctcggcttttgtcgtgcgagagaaatctggaaatgccgcctttgccgcgccaatggccttgatcgtgtcctgctcatcggccaatcgaacctggccaatatgttgagcggttgctgggttgaacaagtcgaacagctcttccccgtgcggcgtgacaaattggccattgatatagatctggttgatctgatgcataaggcctccagaggctctcgattggtatgccctacggtaagcgcttatgattgatctgataatccgtacaaaaacgaatggcttaatgagaagatcaggacaatgaacacgtcaggattaaacgaactggaagcagtattggccgtagcacggcatcggagcttccgtgcagcggcgaccgagttgaatgtgtcgacgtcagcactgagccattcagtcgccgcgcttgaagctcgcatgggcgtccgactctttaatcgtacgacgcgtagcgtgtcgatgtcggaggtcggcgctgagtttgtcagcactattactcctgcactttcgactattcgagtagcgcttgagcaggccggtaacagccaggcagcacccagcggcacgctacggctcaatacttccgccggcgcggccaagcaggtgatgccactgctgttggagtacatgaggcgctatccgcagatgaagctggatatcgtcacggaaggtcgattggtcgacatcgttgcgcaggggttcgacgcaggaattcgcctaggcgatagcgtgcctcaagacatgattgcagtcgatatcagcccgccccaaaggtttgctgttctcggcagccccgcctatttcgccagataccctgtccctttgagccccctggacttaaacacgcatgaatgcgtccgcagtcggatgccgagcggcgcgatctatcactgggagtttgaacgccatggtgaaagcatttccgtgaatgtacagggagcaataacacttgataacccgacattgatgcttcgagccgccagggccgggcttgggctgacttacctgacagaatggaatgcgtctgcagacttggccaagggcacgttagtgcgtgtacttgaggagtggaccccccatctcgattcactacgcctctattacccaggcaggcgtcacgtgccagcaggcttgagggcgctgattgagctgatcagggaacaagagttctgaaacaatttttgcagttttattttccgaccgcccaaaacaaaacccctgtttgcgttagcaaacaggggttctggaatttaatcttgacgatgacctactctcacatggggaaaccccacactaccatcggcgatgcatcgtttcactactgagttcgggatgggatcaggtggttccaatgctctatggtcgtcaagaaattcgggtactgagtcgtggcttatgccccgcttcagcaaattgggtatgtgacagctttcggtgttttgtgaacgtcgaactttcggttcatctcgtcttcacacaccgcaatctgatgctcgttagagtagtcaaattgcttgggtgttatatggtcaagcctcacgggcaattagtattggttagctcaacgcctcacagcgcttacacacccaacctatcaacgtcgtagtcttcgacggcccttcagggaactcaaggttccagtgagatctcatcttgaggctagtttcccgcttagatgctttcagcggttatctattccgaacatagctacccggcaatgccactggcgtgacaaccggaacaccagaggttcgtccactccggtcctctcgtactaggagcagcccctctcaaatctcaaacgtccacggcagatagggaccgaactgtctcacgacgttctaaacccagctcgcgtaccactttaaatggcgaacagccatacccttgggaccggcttcagccccaggatgtgatgagccgacatcgaggtgccaaacaccgccgtcgatatgaactcttgggcggtatcagcctgttatccccggagtaccttttatccgttgagcgatggcccttccatacagaaccaccggatcactaagacctactttcgtacctgctcgacgtgtctgtctcgcagtcaagcgcgcttttgcctttatactctacgaccgatttccgaccggtctgagcgcaccttcgtactcctccgttactctttaggaggagaccgccccagtcaaactacccaccatacactgtcctcgatccggataacggacctgagttagaacctcaaagttgccagggtggtatttcaaggatggctccacgcagactggcgtccacgcttcaaagcctcccacctatcctacacaagcaaattcaaagtccagtgcaaagctatagtaaaggttcacggggtctttccgtctagccgcggatacactgcatcttcacagcgatttcaatttcactgagtctcgggtggagacagcgccgccatcgttacgccattcgtgcaggtcggaacttacccgacaaggaatttcgctaccttaggaccgttatagttacggccgccgtttaccggggcttcgatcaagagcttcgcgttagctaaccccatcaattaaccttccggcaccgggcaggcgtcacaccctatacgtccactttcgtgtttgcagagtgctgtgtttttaataaacagtcgcagcggcctggtatcttcgaccggcatgagcttacggagcaagtccttcaccctcaccggcgcaccttctcccgaagttacggtgccattttgcctagttccttcacccgagttctctcaagcgccttggtattctctacccaaccacctgtgtcggtttggggtacggttcctggttacctgaagcttagaagcttttcttggaagcatggcatcaaccacttcgctaactaaaagttagctcgtcatcagctctcggccttaagatcccggatttacctaagatctcagcctaccaccttaaacttggacaaccaacgccaagctggcctagccttctccgtccctccatcgcaataaccagaagtacaggaatattaacctgttttccatcgactacgcttttcagcctcgccttagggaccgactaaccctgcgtcgattaacgttgcgcaggaaaccttggtctttcggcgtgggtgtttttcacacccattgtcgttactcatgtcagcattcgcacttctgatacctccagcaagcttctcaactcaccttcacaggcttacagaacgctcctctaccgcatcacttacgtgatacccgtagcttcggtgtatggtttgagccccgttacatcttccgcgcaggccgactcgactagtgagctattacgctttctttaaagggtggctgcttctaagccaacctcctagctgtctaagccttcccacatcgtttcccacttaaccataactttgggaccttagctgacggtctgggttgtttcccttttcacgacggacgttagcacccgccgtgtgtctcccatgctcggcacttgtaggtattcggagtttgcatcggtttggtaagtcgggatgaccccctagccgaaacagtgctctaccccctacagtgatacatgaggcgctacctaaatagctttcgaggagaaccagctatctccgagcttgattagcctttcactccgatccacaggtcatccgctaacttttcaacggtagtcggttcggtcctccagttagtgttacccaaccttcaacctgcccatggatagatcgcccggtttcgggtctattcccagcgactagacgccctattaagactcgctttcgctacgcctcccctattcggttaagctcgccactgaaaataagtcgctgacccattatacaaaaggtacgcagtcacagaacaaagtctgctcccactgcttgtacgcatacggtttcaggatctatttcactcccctctccggggttcttttcgcctttccctcacggtactagttcactatcggtcagtcagtagtatttagccttggaggatggtccccccatattcagacaaagtttctcgtgctccgtcctactcgatttcatgactaagagattttcgcgtacagggctatcacccactatggccgcactttccagagcgttccgctaatctcaaagccacttaagggctagtccccgttcgctcgccactactaagggaatctcggttgatttcttttcctcagggtacttagatgtttcagttcccctggttcgcctcttacgcctatgtattcagcgtaagataaccatcttatgatggctgggttcccccattcagacatctccggatcaaagtctgtttgccgactccccgaagcttttcgcaggctaccacgtctttcatcgcctctgactgccaaggcatccaccgtatgcgcttcttcacttgaccatataaccccaagcaatctggttatactgtgaagacaacattcgccgaaaattcgaatttctcaactaagagaactcacaaattttaccttagcctgatccgttaccagtgaaagtaacgttcagtctatctttctatcacatacccaaatttttaaagaacgatctaatcaaagactagaaatcaacattcaccatcaacctgatggaatgctcatttctaagctttcataacgtagaagcagtagtggtggagccaaacgggatcgaaccgttgacctcctgcgtgcaaggcaggcgctctcccagctgagctatggccccgtatttctacaggcgtttcccacacaaaattggtgggtctgggcagattcgaactgccgacctcacccttatcaggggtgcgctctaaccaactgagctacagacccaatttcgggctgcttcttatcgtcttcttcaatgaatcaagcaattcgtgtgggaacttatggagcagctgatgtcgtcgattaaggaggtgatccagccgcaggttcccctacggctaccttgttacgacttcaccccagtcatgaatcacaccgtggtaaccgtcctcccgaaggttagactagctacttctggtgcaacccactcccatggtgtgacgggcggtgtgtacaaggcccgggaacgtattcaccgcgacattctgattcgcgattactagcgattccgacttcacgcagtcgagttgcagactgcgatccggactacgatcggttttatgggattagctccacctcgcggcttggcaaccctctgtaccgaccattgtagcacgtgtgtagcccaggccgtaagggccatgatgacttgacgtcatccccaccttcctccggtttgtcaccggcagtctccttagagtgcccaccataacgtgctggtaactaaggacaagggttgcgctcgttacgggacttaacccaacatctcacgacacgagctgacgacagccatgcagcacctgtctcaatgttcccgaaggcaccaatccatctctggaaagttcattggatgtcaaggcctggtaaggttcttcgcgttgcttcgaattaaaccacatgctccaccgcttgtgcgggcccccgtcaattcatttgagttttaaccttgcggccgtactccccaggcggtcaacttaatgcgttagctgcgccactaaaagctcaaggcttccaacggctagttgacatcgtttacggcgtggactaccagggtatctaatcctgtttgctccccacgctttcgcacctcagtgtcagtattagtccaggtggtcgccttcgccactggtgttccttcctatatctacgcatttcaccgctacacaggaaattccaccaccctctaccatactctagtcagtcagttttgaatgcagttcccaggttgagcccggggatttcacatccaacttaacaaaccacctacgcgcgctttacgcccagtaattccgattaacgcttgcaccctctgtattaccgcggctgctggcacagagttagccggtgcttattctgtcggtaacgtcaaaattgcagagtattaatctacaacccttcctcccaacttaaagtgctttacaatccgaagaccttcttcacacacgcggcatggctggatcaggctttcgcccattgtccaatattccccactgctgcctcccgtaggagtctggaccgtgtctcagttccagtgtgactgatcatcctctcagaccagttacggatcgtcgccttggtgagccattacctcaccaactagctaatccgacctaggctcatctgatagcgcaaggcccgaaggtcccctgctttctcccgtaggacgtatgcggtattagcgtccgtttccgaacgttatcccccactaccaggcagattcctaggcattactcacccgtccgccgctctcaagagaagcaagcttctctctaccgctcgacttgcatgtgttaggcctgccgccagcgttcaatctgagccatgatcaaactcttcagttcaaacatctttgggtttttaagaaaccctaaacttggctcagcaatcgttggttacatctttgatttctcgcggagtaacttgtgatgctgataatcttgttgactatcactctgactccacaagcacccacacgaattgcttgattcagttgttaaagagcggttggttaagatctttcgtctcaaccgaggcgcgcattctacagcagcctcatttgctgtcaagtgattattttcagaagttttcgaagatttcttcaacaacttcaaccacttgcgcttccgatctctcgttagcgggaggcgaattctacagcgttacacgctgctgtcaacacctctttttctccgctttcgaccgagaggatcgaaacgttaatagagccaaacaacaccgctctatcaactccttctgggcttcgatgaactgaagcaactcactgtcgaatctcgcataactctttgtttaccaaggagttttccgtttcgactgcgccggaagtggggcgaattatagacttccagaatctgccgtcaacccttaattttgcttttctatcaaacagactcaaatacaccaatccctctctatatagagagcggcggccaaacaaatgagcaatatattgctcaaagcaaaacagttaagcatcatggtgctttctgactctctaccttgaatctggacgccccacccaatgaccaccccacaacgcagcctggcttcggcattgttccctgtcggcctgctgctgatcgccatggcttccatccagtcaggcgcatcgctggccaaaagcatgtttccaatcgtcggcgcccaagggactacaaccctgcgcctgatatttgccagtgtcatcatgctgcttctattacgcccgtggcgtgccaagctgacagccaagtccctgcgcacggtggttatctatgggatggcactgggcggcatgaactttctcttttatatgtccttgcgcacggtcccccttggcattgcggtcgctctcgaattcacaggcccgctcgccgtcgccctctacgcctcgcggcgagcggtggatttcttgtggattgcgctcgcgattgccggccttctcttgttgataccaatgggcgaagcgagcagcggtatcgacttgaccggtgccgcctacgcgttaggcgcaggtgtctgctgggcgctctatatcctgttcgggcaaaaggcgggcaacgacaatggtgtgcaaactgcagcccttggcgtaatgatcgccgccttgtttgtggcccctatcggtatcgtccacgctggggctgccttgctgactcccgcccttatccctatcgccattggcgtcgccgttttatccaccgccttgccctacaccctggagatggtcgcgctgactcgcctgcctgcacgcaccttcgggaccttgatgagtatcgaaccggcattcggcgctctctccggcctattcttcctgcaagagcacttgtccctcgcacaatggctggccatcacctgcatcattctggcctccgtgggtgccacgctgacaatgcgcaacgaatccaaaccgctggtgccagccgattgatcatctttaaaggttgctctggtatttaccgttcatttaggccatgtttaagccgcaaacgaatgtcattcatggagaatttcgacaaggacagctgaacgctacaatcgagagcgagtgaagcctgctttgggacttttggcgaagcggctataaggatgggaatgaagcgaattttgatactgttaatggttgtggccatggctggctgtgctgcgaccaccaagacagaagtgaaacggggcaaaaaagggctgcatatcaactgttccggcctgtcctcctcctgggaccagtgctacaccagcgcagccaattcatgcggcgccaagggctaccgggtcatcgccaaatccggtgacaattccgaggagcctggtgattacccctttggcctcaaccccgctggctataccagccgcagcatgatcgtcatttgcaaatgaaagcccgagcagtcactcacgactgctcatcaaattcctgccatcccccctccccttcgtggcgctgcgtctagactcctgctcgataatcgagccaacggagttcccatgacactgaacaagaaaatcgtattggtagtcggtgccggtgatgccaccggcggtgccattgccaagcgctttgcccgcgaaggctacgtcgcatgcgtgacccgtcgcagcgccgaaaaattgcagcctctggtagacagcatccagtcggcaggtggcgaggcccacggctttgcctgcgatgcacgtaaagaagaggacgtggtcgccttgatcgagaagattgaaaccgaactgggccctatcgaagcattcgtcttcaatatcggcgcgaatgtgccctgcagcattctcgaagaaaccgcgcgcaaatacttcaagatctgggaaatggcctgcttctcgggcttcttgaatgctcgtgaggtggccaagcgcatggtcacccgcagccgcggcaccatcctgttcacgggcgccaccgcaggcctgcgcggcgctgccggtttcgctgcgttcgccggcgccaagcacggcattcgggcgcttgcgcaaagcatggcgcgggagctgggccccaggaatatccatgttgcccatatcgtggtcgacggcgccatcgacacagacttcattcgcgacaattttccgcaaaagtacgcccagaaagatcaggacggcatactcaaccccgaccacattgccgacaactattggtacctgcacaaccagccacgagacgcgtggaccttcgagctggacctgcgcccatggaatgaaccctggtaaacccgccctcaataacaaaagccgcgagtaccgaccatgaacaaaaccctggaattcttctttgatcttggcagccccgccacttacctggcctatacccagctgcctgccctgtgcgcagaaaccggcacacagcttgtctatcaacccatgctgctgggcggtgtgttcaaagccaccggcaatgcttcgccgatcaccgtcccggccaaggggcgctatatgtttgatgatttggcacgctatgccaagcgctacaacgtcgtgctcaaattcaacccgcacttccctatcaacaccctggtactgatgcgcgccatcaccggtatccagatgcatcagcccgaacgcttcctggactttatcgactgcctgtttcaggccctctgggtagaaggacgccacctgggtgaccccgccgtcgtggccgcagtgctcaccgagcacggtttcgacccggaagaggttctggccctggccaacgatgacggcgtaaaaaccagcctcaaggacaaaaccgaagaagcgatccagcgcggcgtgtttggcgcccccagtatgtttgtaggagaccggctcttcttcggtcaggaccgtctggactttgtgcgcgaagcccttggctagatctcaatcgccaaccgcccttgagcgccgcttgcgagcaaatcgtaggcggcatttgctgttcgcaaatcaaattgacgtggatccatgatcggcttgagcttgccggcgtcgatcaacaaggtcgcttcggcaagaatatgtccgtggtgctcacgtcctttgcccgtcaacaacggtaacaaggtaaacacaccggaataggttgccccccgaaacgacagtggcgccaggctgtgttgcccccagcccaagcagctcaccacgtggccactgtacgtcttggctgcacgaaaggacgcatccagcgtggcaccgccgaccgtgtcgtacacaatgtcgaagccttcaccttcagtgtgcaatgccacatattcttcaaccgtttgttgctgatagtcgataaaggtcgcccccaggccttcaatggtcgcccgatgcctcgccgaacccgtcgcgtatacctcagcaccgaacgcaaccgccaactgcaccgcaacatggccgacaccccctgcaccgccctgaatcaaaaccctgtgcccagcccccacacgggcacgatccaccaacccttcccacgcagtaatcagcaccagcggcagcacagcggcttcacgcatgctcaaggtcacaggctttttcgccagcaagcgtgcgtcgactaccgcgaattcggccaacgatccctgcacgccgccgataccggtgccgagggcgtaaacctcatcgccgggttgccactcgcctgccgaagagccaaccgcttcgacggttcccgccaggtcaatgccaagaattgcaggcaaaggttgcccggcatgcgcggcctggcctgcacgaatctttccatccagtgggttaagaccactggcacggattctgactagcacgtcaccagggcccgcaaccggttttggcagggtcgccagacgaaatggcgcatccactgtgtcgaccatcaaaacattcatagaagtcatctcagcaatcccggttcattgaaggtgaagcctatgatcggctcacacactcattccgataagacgctgaaaagctatagtacctatgcacacacagcatgaatgggacggcccgtggacaaactcaacgcaatggcgattttcgttcgagtgatcgagcgcggcagcttttccgccgtcgcccgggaaatgcagaccacccagcccaccatcagcaaagtgctgcgaagtctggaaaccgagctgggtggcaagctgattgcccgcagtacacgccacctttccctgacggacgagggtcagcgctattacaaccattgcagggaaatccttgccgcggtggacgcagcggaacacagcttccaaaccggcaaggaggcaatcgccggcccgctgcgcattggttcgtcggtgagctttgggcgcctgcatatcgccccacgcctgagtgattttctgcagcaatttcccgaggtcgaggtagatctgcagctcaatgatcaactacaggacctggtcagcgaaggcctggacgtgaccctgcgaattggcgaattgcgagacagcggtctgatcgcccgacaaatcggtactacgcaccgtgtcacactggccagcccggcctacctcgccaggcacgcggcgccgcaaaccccacaagatctcgcgcagcacaactgcctgctcttcaacctgctgagcagccagaaccaatggatttacgacaaggacggaaaacgccatacggtgcgcatcagcggcaacgcccagagtaataactccgaggcggtgcgcgagatggtgttgacggggctcggcattgcgctgtcgcccctgtggttgttcgccgatgacttgaaagccggccgcgtggtcgcgttactgcagggctacaccccgctgtcgctgccgatccacgcggtgtcggcgcccaatcgtcgtcagtcggcccgggtcagggcgtttgtcgactacctggccgacgccctggcccgagcccctgaattgcaaccgatcagatagccgccgtacgaacctgcagccattccagcgcggcgccaccgagcaacgggctcaagcgctctcgcacctcggcgtgatagccgttgaaccactcgcgctcgtccgccgtcagcaacgacggctccaggcaacgggtgtcaatcgggcacagcgtcagggtttcgaacttaaggaactcaccgaactcggttttgcccgcttcacggttcagcaccaggttttcgatgcgcacaccccaacgccccgggcgataggtgcccggctcaatcgaggtaatcatccccggttgcatcgcggtttgtggtgcagtggcggcctgataggcgatcacttgcggaccttcatgcacattcaggaaataacctacgccatggccggtaccgtggccgtagtccacaccctcggcccagatcggcgcgcgcgcaatggaatcgagcagcggcgacagaatgcccttggggaagtgcgcacgagagagcgcaatcacacctttaagcacacgcgtgcagtcgcgcttctgctcatcgctcggcgtaccgataggcaccatccgcgtgatgtcggtggtgccgcccaggtactggccgcccgaatcgatcagcagcaaaccatcgccttcgatcaacgcatgctcttcttcggtggcgtggtagtgcggcatcgcaccgttggcgttgaacgcggcaatggtattgaagctcagcgatacataatccggccgacgggtacgcgccgcggtcaggtgttcgtcgatggtcagctcggtaatgcgctcccggcccagggcgctttccagccaggcgaaaaattcgcacagggccgcaccgtcctgttccatggcctggcgaatgtgctcggcgtccgccaggcttttgcgcgatttggccaatgtggtcgggttcagcccttcgatcagcttcacgccggcttccagattctccagcaggcccgtcgtgacgcgagccgggtctacctgcacgctcgcgccggccggtacggcacgcagcgcatccgccacttcgcggtagtcgcgcaaggtcacgccgtcctgttccagcacagcgcgcaattcgtcatcgactttgctcaatgccacaaacaaggtggcttgctgctgattgatcagggcaaaggatacaaacaccgggttgaacgacacatcaccgccgcgcaggttgaacagccaggcgatgtcatccagggtggcgatgaaatgccagtcggcgcccttctctttcaggcttgcacgcagcgcagccagtttttcgccgcggctgacggtggcctgtggcggcaggtgttggtaaatcggctggtttggcaacgccgggcggtcttgccagacctcggccagcaagtcgatgtcggtacgcagacgcgcaccgcgttcttccagcttgccgcccaacgtacgtgccgaggccacggccatcaccgcgccatccaccgccaccacaccgccctcaggcgtttgctcggccagccactccagcgggccgggttggccgggctgcaacttcacaagctcgatgccgctgcccttgagttccttggtggcctgctcccaatagcggctgtcggcccaaaccccggcgaaatcggcagtaacaatcagcgtgcccaccgacccatgaaaccccgacaaccattgccgcccctgccagtaccccggcaggtattcggacaaatgcgggtcggccgacggcaccagcagggcgtggatgccctcgcggctcatcagttcacgggtatgcgccaggcgctggggaaccgttccatggatcaaaggctgcgtactcattgtgtctcctgctaaccactcatcattattatgtgttgcgaatgaaatcagaccgcccagaacgcgggtgcgctggccaatgcagccttgatcagtttcacagcctcgtcgatatcctgctcggtggtaaaccggcccaggctcaggcgaatggtgcggccggcgctgcgggcgtcatggcccaaagccaaaagcacgtgggacggcgcattgctggccgagttgcaggccgatgtggccgaaaacgcgatacctgcgctcaacgcggcggaattgaattcaccttcgccaaacgtgaggctcagggtgtgagggatacgctgggtcaggctgccattcacacgcaggcccgccaccgattccaattgttccaacaggcgttggcgcaaggccacaatcttcgctttctcttcagcaaaagacgctgcagccaaggcaaatgctgtgcccatgcctgcaatctgatgcgtcgccagggtgccggagcgcaaaccgccctcatggccacccccgtgaatctgcgccaacaccttctgttgcgcgcgcgggccgacgtagagcgcgccgatacctttgggcccgtatagcttgtgcgcagaaaacgacatcaagtccaccggccactcggccaggtcaatggcaaccttgcccgcgccctgtgcagcatccacatgcatcaaagcgccatgctcacgcacgcgggcgccgatggcggggatgtcgttcaaggtgcccagttcgttattgaccagcatcagcgacaccagaaaggtgtcttcgcgcaaggcttcactgaccgcttgcgcgctgatcagaccctcggcatccggcaccaggtaggtcacggccacgccggcttcctgtaattgtcgcgcggtatcgagcgtggccttgtgttcgatctggctggtgatgatgtgcccacccgccacgccgcgcgcctgggcgacgcccttgatcgcgaggttattggattcggtggcgccggaagtccagacgatctgctcagggctcgcgccgaccagttcggccacttgagcgcgcgcctgttcaaccgtctgccgggccgcttggccgaacgcatgggaactggacgcggggttgccgaaattggcgttgaagcccagacactcgaccattacctggatgacacgctcatccaccggcgtggtggcggcgtagtcgaaatacaacggacgtttattcatgacgttaaagactcgcagagcgtgttcccgagagaggtgtctcaggggcattgaccgggacagaggtcgtcaggtttaaccaatcgaatgccattgaagaaggaccactttatttaaatgtgcgtaggaacgctcctgaaattcagcttaacaggctgaagtggcgccatggcaaacaaaaagcccgagattccttgtggaaatctcgggctttttgccatcaagcacgggctcaactggggcgaccgtgcagcgtgacactgcgttcggcattcatttcaccctggtgatcaaaaccgaaagccttttgtggctgcccggtcaatgcagcacgttgctgttgatattcatcgaacgacaacccgcgacgactcagcgcttccaacgccagctgtttggtttcttctgccgtatacggacgcgactcgggagacggatgagtcgcacatccagcgaggacggagctgacaactaacagcgaaacagcaagaaaacggttcatggcggcggccctgcaaagaaggttctgagtcaatgaacacaggctactcccgcccttgcacaacgaaaaatcatcgcccgtgatagtcgctatcaaccattcagacactctcgatagcgcgccttcatattcttttcagaactataaatatggaaatacgttcatttacggaataaacgtaaccttctataaatggcttgcgccgaaacaatactgttcgccacgcaactgttgccagggaaacaccgcttcaacaaaacaccagtcacacaacagctccattgttcagcagtgagcccgcagcccttgccaatcaaggctttaagccgttggtacagctcttgctcaagccgtatgacttcacttgctatgaaccactgttgataaaggaactgttcatgacccgtcccctgaatgtcgttgccctctccggcggtacctggcgcccgtcccgcaccctggtgctgacccaagccgtgctggccgaactcgctaccctgctgccgatccagaccaccctcatcgagttgggcgacattgcccggccactgggcggcgcgctgtcgcgcgatgagctgccggccgacgtcgaatcccaattgttggccatcgaacaggccgacctgttgatcgttgccgccccggtgtatcgcggctcctacccaggtctgctcaagcacctgttcgaccaggtcggcctcaacgcgttgatcaacacgccggtattactcgctgccacaggcggcagcgaacgccacgcgctggtcctcgatcatcagttgcgcccgttgttcagcttcttccaggccctgacgttgccgatcggcgtgtatgccaccgaggccgatttcaccgactaccaaatcaccagcgacttgttaaaagcccgtatccaactggcggcagaacgcgctgcgcccttgtttagcgcccacgccccttcgctgctgaaaatcgcataaggatttgtcatggatgttttctggtttctacccacccacggcgacggtcattacctgggcaccactcagggtgcacgcccggtcaccctcaattacctgaagcaagtcgcccaagcggctgacagcctcggctaccacggcgtgctgattcctaccgggcgctcgtgcgaagactcctgggtcatcgcttcagcgttggtgccgctgaccgagcgcctgcgttatctggtagcgattcgccccggcatcatctcgccgacggtgtccgcacgcatggcggccacgctggatcgtctgtccaacgggcgcttgctgatcaacgtggtcaccggcggcgacccggacgaaaaccgtggcgacggcagcttcctcgaccacagcgaacgctacgaagtctccgacgaattcctaaagatctggcgccgcgtattgcagggcgaatccgtggacttcgaaggcaaacacctgcgcgtacagaacgccaaggcgctttacccacccgtgcaaaagccttatccgcccctgtacttcggtggctcctccgacgcggcccacgacctcgccgctgaacaagtagacgtgtacctgacctggggcgaaccacccgccgccgtcgcagaaaaactcgcggatgtacgtgagcgcgccgcgcgccacggccgtaccgtgaaattcggcatccgcctgcatgtgatcgtgcgcgaaaccgaagaagaggcctggaaagccgccgacaaactgatcgagcacatcagcgacgaaaccatcgccgccgcgcaaaaatccttctcgcgctttgactccgaaggccagcgccgcatggctgccctgcacgacgggcgccgtgacaacctggaaattgcccccaacctctgggccggcgtcggcttggtacgcggcggtgccggcaccgcgctggtaggcaacccgcagcaagtggccgaacgcatcaaggaatacgcggacctgggcattgagagcttcattttctccggttacccgcacctggaagaggcctatcgctttgccgaactggtgttcccgttgctgccggaaccctacgcgagcctcgccgggcgtggtgtcaccaacctcacgggcccgtttggcgaaatgattgccaacgatgtgctgccgaacaccaaggcctgagatctgttttgtgcggtcattgctcttctgtgggagccgggcttgcccgcgatgcaggcggctcggtgtgtcaggggttgccaggtgatgcaatcgcaggcaagccagctcccacagttgatctttatcgcctggcagatagcgctcggcttttgacctaattgaggaacaccgcgtgacagccaacccccacagcgtcctgccctcccccttgcagaccgccaaactgctggccgccgaattcgccctcaccgccgttgaacgcgatgagcgcggcggcacacccaaaaccgaacgcgatgccctgcgccacagcggcctgctggccctgagcatccccacgcaatacggcggccttggcgcacgctggagtgaaaccctgggcatcgtgcgtgagttcgccagggtcgacagctccatcgcccacgtcttcggcttccaccacctgatgctcgccaccgtgcgccttttctcgcgcccggaacaatggcagccctggtttgaacaaactgcacgcaagcactggttctggggcaatgccctcaacccgctggacacccgcaccgtcgtcaaggatttcggcggctggcgggaattctccggcaagaaaagcttctgctccggcgccagcgactcgcaaatgctgatcgcctccgcggtggacgaaagcgccggcggcaagctactgatcgctgccatccccagcgggcgcagcggcattaccttacacaacgactggaacaatatcggccagcgccagaccgacagcggcagcgccagcttcgagcgtgtgcgtgtcgaagaatcggagctgctgctagatccaggcccgctgagcacaccgtttgcctgcctgcggccactgatcgcgcaactgacctttacgcatatgtttctcgggattgctgaaggcgcttttgaagaagcgcgcaattacacgaccaccgaaacccgcgcatggcacaaatcctcggccgaagacgtacgccaagacccctacgtgctgcaccactacggcgagttctgggtcgcactggaaggcgtacggttgctggtggagcgtgccgcagacttgctcgaccaggcgtgggccaaaggccccaacctcagcgaacacgaacgcggccaactggccatcgccatcgcgaccgccaaggtggcggccacccgccagggcctggacctgtgcagccgcctgtttgaagtcaccggcgcacgttccacccacgcctcgctgcgcctggaccgccactggcgcaacctgcgcacacaaaccttgcacgacccggtggactacaaactccacgaactgggggactgggccttgaaccaatccctgcccattcctacgttctactcctgagagaggtgcccatgcagcttttgaccctaccgccctcgcccgcgctggccacgtcgatccgcgccacggcccaggtcttcgaagacccgaaatcccaggcgctgctcgcccacatccagcaagtggcgcccagtgaggccagcgtgctgatcatcggcgaaaccggtaccggtaaagagctggtggcgcggcatatccacaacctcagtgcacggcgcaaccggccgttcgtggcggttaactgcggcgcgttctctgaatcgctggtggaagccgagctgttcgggcatgaaaaaggcgccttcaccggcgccctcagcgccaaggccggctggttcgaagaggccgacggcggcaccttgtttctggatgagatcggcgatttgccgatggcgatccaggtcaagctgttgcgcgttttgcaggagcgcgaagtggtgcgcctgggctcgcgcaaaagcattgcgattgatgtgcgggtgctggcggccaccaacgtgcaactggaaaaagccatcaacgccgggcattttcgtgaagacctgtattaccgtctcgacgtggtcagcctggaactcagcccgctgcgcgaccgcccgggcgatatcctgccgctgacccggcactttgtcgaagcctacagccaacgcttgggctacggcccgatcaccatcagccgtgaggccgagcacaagctcaagagctacagctggccgggcaacatccgcgaactggaaaacgtgattcaccacaccctgttgatctgccgtaacggcgtgatcgaacgggatgacttacgcctgtcgaacatgcgcatcgagcgccaggacgacagccaacacgccgccgacaatagcgccgaagccctgctcgcacgcgcgtttcagaagctgttcgaagaacaggccggcgcgctgcatgaaaaggtcgaggacgcgttattgcgtgccgcttaccgcttcagccattacaaccaggtgcacaccgccaacctgctgggcctgagccgcaacgtgacacgcacccgcctgatcaagatcggcgaactggcagtgaacaaacgccgccccggggaaaacctgcagggcgagcgcatgctgcatctatccatttaggcggcagtgcaacgcgttgtcctggctgcgctcgaaactgcgcagcacctggaacgaaccaaaggtcaccgccgtggcctgatgggcgcggatcagcgtccaaaaatcctcctcgccccgctcaaagcgctggaacgccgcctcgcccgcctcgcgggtttgccattgcaggtaattgagcacgcgccgcccatcatcgctgacctgcacgctcgcactcagaaagccaccatggccttgggccaggcgctcgctttgagtgctcagggccgccaccagggcgacttgctgttggggctcgatctggaattcgatcaattgagtgaaactgcgattcttctctgatacctgcatgaacactcccctctctttgtaggcagaatcttgcgattcgatgccacgcagggtaaaacctctagttaagtcaaggtcaagcgttgtttcggagtttttcatgctcactaaagcactcacggtcggccaattggccgcgcgcagtggcgtcgcagtcacggcgctgcacttttacgaatccaaggggctgatcaagagcaaccgcaatgccggcaaccagcgccgctatccacgggacgtgttgcggcgtgtggtggtgatcaagatcgcccagcgcctggggattccgctggcgaccattggccaggcgctgcagactctgccggatggccgcacaccgacggctgaagattgggaacgcttgtcggcgctctggcgcgaggacctggatgagcgcatcaacaagctgatgctgctgcgcgacaagctcagtggctgtattggctgcgggtgtttgtcgctggaggcgtgcccgttgcgtaatcaggatgatcaattgggtgagcacgggccgggggcgcaactattggaacccaccacccaaccctgaattgataacccattaatgtgggagctggcttgcctgcgatagcggtgtgtcaattacagatgggcaagctgacccaccgctttcgcaggcaagccagctcccacatttgatctctattgaacttagaagcccggggcaatctgacccttgtagcgcgtcaaaatgaactggcgcacttcatcggaattcagcgccttggccagtttctgaatgcgcgggtcattaatgttgtccggccgcgccaccaggtactcgacatacagcgacttgcccttctccacaatcaacgcactgttggtatcgatccccgcttccagcgcgtagttggcaaacacaaacgccaaatccacctggctcaccgagcgggccagcaaggcgccttccagttcacggatcttcagatgcttggggttctccacgatttcacgcggggtgctgagggtgttgctcgggtccttgagtttgatcaacccggcctcatccagcagcaccagcgcacggccggtgttgaccgggtcgttggggatcgacacggtggcgccgtccttcaactccgaaatgttcttgatgcgcgtcgaatatgccccgaatggctcgatatgcacgcccaccaccggcaccaggtcggtgtggcgggtcttgttgtagtcatcgaggaacgggcggtactggtaatagttggcatcgatgtttttcagcgccaactgctggttgggttggatgaagtcagtgaagactttgatctgcaggtcgacgccttccttggccaataccggcttcacgaactcaaggatttccgcatggggcacgggggtggcgccgaccaccaacgtttcgttggcaaaggcattgaacgacaggacagcagccaaaatggccagggactttttcatgaatgctccaaacaaggctttataagtattaacggcggctgtaacgcgccaccaaacgatcaccggtcatttgcagggcctgcaccagcaccagcaaaagcagcacggtgaccaccatcacgtcggtctggaaccgctggtagccataacgaatcgccaggtcgcccaggccaccgccgccgatcaccccggccatcgcggtgtagtccaccagcacaatggcggtaacggtcaccgccgccaacaatccacctctggcttcgggcaacagcgtgtggcggatcacctgccaggtgctggcgcccatggcctgggtcgcctccaccacgccacggtcgacttcgcgcagcgcggtttccaccagccgtgcaaagaacggcgtacatcccaccaccagcggcgggatggtgcccggcacgccgagcgacgtgcccaccagcaaggtggtcaacgggatcaacacaatcagcagaatgatgaacggcagcgagcgcagcacattgaccaccaccgacagcagccggtacaccaccagtgcctcatgcagctggcgcttgccagtgagaaataacagcactcccagcggcaaccccagcagcacggtaaaccccagggcagcggcgagcatgctcagggtttccacgcacgcttggccgatgtcggcccagtagatgttcttgaacaattcggccatgaatcacgaccagtcgtgacgaggcggctggatgccattgagcaaccagttgcccaccacgtggtatttccagcgcaccgggtcgtgcaaggtgtgcacccgggcgttgcgccaatggcggtcgaagttgtgcttcttcaaggttgagcgagtcccgccgagttcgaagagtttgttgctggcttcgatggcgatttcggtggtcagtacctttgcccgggccacagccagggacgcgtgggcgacgttgtctgcattcggtgccgggcgcgcggcatccagggcaaaacctgcgcgctccaacaaggcttcggcagcctccagccgaatatccagggcaccgacctgaatgatggtcagcgggtcttcgctggctttttcaaccccggcgtcgatccagggccgcgcaaattgctgcacgaactgcaccgtgtcacgcaacgcggcgcgggcgataccggcgtcgatggcggcggtagtcagttgtgcgaaaggcccggccagggtcggcgaatcgtaggatttatgcgtaggaaacagattgaacgccggcacccggagattctctgccagcaccgtgccgctcgacgtggtgcgctggcccatgctgtcccagtcatccaccaccaccagcccttcggtgccacgcttcacgaaggccagttgcgcattttgctgctcgtccagcgccagcacggccagccaatgggcgtacagcgagccggtgcaataacccttgcggccattgatcacatagccgtcgccttcgcggcggatcgtcgcctggatgtcctgcacatgcttgccgccggtttccgacagcgcattggcaaaccgatggccctgcaatgccagcgcgaaaaaatgtgcctgttgctcgggcgagccttgcaggcggatgtcttccagcaagcagtaatggttctgcgggatttgccccagggagggatcggccgccgaaatgatcgcaatcacctgggccagcaccgcgtaagacacctgcgccccaccaaactcgcgcggcacgctgatgccccacaggccactgttggaatacaggtccaccacgtcggcgggtacctggcgggtgcggtcacgctcggcgtcctgctccagcaaaacggcggcgacgcgatgggcgacggcaatcgcctcggcttcatcgcggatcacaacggcatggggcgtgtggatggggtaatcggcagatacaaaaggcacagacatacaacgctctcgggcgaatggtttgcctggggtattgcagcttctgtgccggggcctgaaaccggcggtttggtgctgtaaaacggatccaaacccgcttatagcgcagcaatctgcccgttcactgttgcctggccaacacctcgtcggctggccgcagcccgcgcgcaccgtggcctatagtgaaaaggccgtgcctccacaccaccacccaaggagaacgaaatgagcgttaaacctgttccagagggctatcacagcgtcacgccttacatgggcatcaacaacgccgccgaagccatcgagttctacacgaaagccttcggcgccacccaagtcatgcgcctggacatgcccgacggcaaggtcggccacgccgagctgcgcattggcgactcggcaatcatgctgggcacgccgtgcgatgaaatggccctgcgcaacccgaccgaacacaccagcgtcggcttgcacctgtacgtgaacgacgtggatgagcaattcaaacaagccgttgcagcgggcgccagcgtggtgtccgagccgaaagaccagttttatggcgaccgctcggcgagcgtgaaggacccgttcgggcatctgtggttcctggccacgcgcaaggaggatttgaccgaagagcagatccgccagcgtgccatggaaatgttcaagcaaggctgagatcccgacggcccccggtgggagctggcttgcctgcgatggcatcgactcaaaatgcctgatgcaccgcagtggctgcatcgcaggcaagccagctcccacaggagtgttcattgtttgccgagaccgtgctcctacacacttcatgaacaacccctccacgctttcccccttgccccgaacgccgcgtgattccaggatgcaagcactaataaagaggagtcatcccatgttcgccggtttccaaaaagacaggtgccacgtcaacggcgtggacatcagctaccgcaaaggcggtacaggtcccggtctgctcctgttgcacgggcacccgcaaacccacgtcatctggcacaaagtcgccgagcaattggccgagcatttcaccgtggtcgccgccgacctgcgcggttatggcgacagcagcaaaccaccggccactggaaaccacgccagctattcaaaacgcgaaatggcccgcgacggcgtcgagctgatgcaggccctgggcttcgacacgttctcggtgctggcccacgaccgtggcgcccgcgtcgcccatcgcctggcgctggaccatccgcatgccgtgcaacgcatggtgctgctggacatcgcgccgacgctggcgatgtacgcccagaccgacgaagccttcgcccgcgcctactggcactggtttttcctgattcgcccggcgccattgcccgaagccctgatcgaaagcaaccccgagctgtacctgcgcagtgtgatgggcagccgcagtgccgggctcaagccgttcaccgacgaagccttcgccgaatacctgcgctgcctgagcctgcccggcactgccaccggcatctgcgaggattaccgtgctgccgccggtatcgacctcgagcatgacaaggcggacatcgacgccggccaccacctcaacctgcccttgttggtgatgtggggcgccgaaggcactgtcggccgctgtttcgaaccgctcaaggaatggcagaaagtcgccaccgacgtacgtggcaaggccctgccggccggccattacatcgctgaagaaatccccgagttgttgctcggcgaagtcctgaccttccttcgctgaatgctgtaaccccgtgacctgatggacccgcctcgcaggctgccaatcgcctgcgacgggttcgctttgccccaaaaaaacgattgagacaataacaatgacaatcagaaaactgctgggaaccctgtacgtgcaggtgctcatcgctatcgcgctgggtgtgttgatcggccatgaatggccgcaaatcggcatcgacctcaagcccttgggcgacgggttcatcaaactgatcaagatgatcatcggcccgatcatcttctgcacggtggtgtccggcatcaccagcatgcacgacgtgaaacaggtgggccgcgtcggcggcaaagccctgctgtatttcgaaatcgtctccaccatcgccctgctgatcggcattctttcggcgcacctgttgcaccccggcgtgggcttcaatatcgatgtgaaaaccctcgacggctcggccatcgccggttttgtcggccaggcgcaacacagtgagggcgtgaccggtttcctgctgaatatcatcccgggcacctttttcgacgccttcgcaaaaggtgaaatcctgccggtgctgtttatttccgtgctgttcggcctcggcctggtgatggtcggcgaaaaggcgcggccactggtcggcgtgatcaaccaagcgagtgaagtgttcttccgcattgtcggcatgatcagccgggtggcgccgattggggcgtttggtgcgattgccttcaccatcggcaagtacggcgtgggttcgttgctgccgctgctgaagttggtgggcacgttctatatcactgcatttttctttgtcgccgtggtgctgggcagcatcgcgcgttacgcagggttcagcattttcaaattgatgggctatatcaagtccgaactgctaatcgtgctgggcaccagttcctcagagtcggcactgccgcaattgatccagaagctggaaagccttggcgcctccaagggcgtggtgggcatcgtggtgccgaccggctacaccttcaacctcgacggcaccaacatctatatgaccctggcggtgctgttcctggcccaggcgaccaatacccacctgccactggagcaacaactgaccctgctggcggtggccatgctcacctccaagggcgccggtgcggtggtcggtgcgggttttgtggcgctggccgcaagcctggccgtggtgccgaccgtgccggtggcggcgatggtgctgatcctgggcgtggaccgcttcatggcggaatgccgctcgctgaccaatatcatcggcaacgccgtggccgcgctagtggtcgccgcctgggaaggcgaactggaccgcgaaaaaatggccccgattgccctcaagcatggccgccatgcgcgggctgccgccaaggcgaagatcgccgccgaataagcgaatagccctgggtgtgccggaaggcacacccaaccggtgctattctggcggctcatgccgccacgtctgtttctgatgacccataagaaagataccgtgcccctacccgaagacctgcgggtgttcctgaccgtgatccgcaaggccggcttcgccgccgccgctgatgagctggggttgtcgccggcgtatgtcagcaagcgtatccagatccttgaaaccaccctggccacccgcttgctgcaccgcaccagccgccgcatcgccctgaccgaagacggcgagcgcgtgcaacgctgggccgtgcgcatcctcgaagacttccagcaactctccgacgaactctccgacgcccatgacagcccccgtggccacctgcatttgtgcagcagtttcggttttggccgcaaccatgtggcgccggccctgtcgttgctggcggaacagtacccggacctggaaatccgcctggacctgtttgaccgcgtggtggacatcgtcagcgaaggcttcgacctggaaattcgcgtgggcgacgacatccccggccagcacatcggccgccggctggtgagcaaccgccgcgtgctgtgcgccgcaccggcttacctcaagcgccgtggcacaccgcaacacctgagcgacctggagcaacatgattgcctggtgctcaaagagcgcgacaacgcgttcggcatctggaacctggagcgcgacggcacgcccgagagtgtgcgcgtgcgcgggccgttgtcgtcgaacaatggcgaaattgtgttgcagtgggcactggatgggcgcggcgtgttgctgcgctcgatgtgggatgtgaaaccgctgctggagcaaggcaagctggtgcaggtgctgcacgactacacccagagcgcgaatgtgtgggcggtgtacccgacgcgattggcgtattcagggaagttgcgggcgtgtgtggagtttttgcaggagcacttcaagggtctatcaatatagatgttgtaaacccgatcacctgtgggagctggcttgcctgcgatagcggtgggtcagctgacatttctgttactgatgcaccgctatcgcaggcaagccagctcccacagattgattattgttgtgtcagctgagccaggggttcgccgcgaggtgtcgctgctcgaaggccttgatctcttcactgcgctgcaacgtgctgccaatcgcatccagccccagcaacagcgcagtcttgcgcaaggtatcaatctggaacgggataacctgcccatctgccaaatgaatatcctgcgcctccagatccacactgatctgcgcctgcgcaggctgactcacggtctgcccgagtttctgcaacacggcctcttccagcgtgatcaacaacacgccgttacgttggcaattgtcatagaaaatcccggcaaagctgctgccgatcagcgcacgaatgccggtttgcttcaagccccacaccgcgtgttcgcggctggaaccacagccgaagttaggcccgaccaccaggaaactcgcgccttgccaggccggctggttcagcacgaattcagggttcagctcgccggacggcaaaaagcgcaagtcgaagaacagcccgcggtccaggccgctgcggtcgatgcctttgagaaactgcttgggcatgatcacatcggtgtcaatatttgccgccagcatcggcgcggccttgccggtgaccagggtgaaaggttgcaggctcatgcgcggtctccaaaatggcggatatcagtgaggcggccggtgatggcggcagcggcgaccatcgccgggctcatcaggtgggtgcgtgcgcccgcgccctggcggccttcgaaattgcggttggtgctggaggcgcagcggtcgccgggggccagcacgtcgtcgttcatcgccaggcacatcgagcagcctgactggcgccattcaaacccggcgtcgataaagatcgccgccagcccttcggcctcagcctggtcgcgcacttcggtggagcccggcacgatcatcgcccgcacgtgctcggccacgtgtttgccacgtaccacactggcagcgtcgcgcaggtcttcgatacgcgcgttggtgcaggaaccaataaatgcgtggctgatgacaatttcactcagcggcatgccggcttccaggcccatgtagttgagggcgcggcgcatgtcctggcgcaggatcaggtcgctgacggcctgcgggtcgggcacacgggcgccgatgggcgcggcctggtcagggctggtgccccaggtgaccatgggttcaagggtgctggcgtcgaggtgtacttcctggtcgaacacggcgtcggcgtccgaatgcaactggcgccagcccaccagggcctgctcccacaattcgccctgcggtgcgcggggtttgcccttgaggtaagcaaagactttttcgtccggcgccataaaggcaccgcgtgcaccggcttccaccgccatgttgcagatggtcatgcgtgcctcgacgctcagcgcgtcgatggtcgagccacggaattcaatggcataaccggttgcgccggacgcaccgatcttgccgatcagcgccatgatcacatctttggaggtcaggcccggcgccagcgcgccatcgaccgtcacgcgcaggcttttcaggcgtttgtagaccagagtttgcgaggccagcaaatgctcgatttccgaggtgccgatgccgaacccaaacgcgcccaatgcaccgtaggtggtggtgtggctatcaccggcggcaatcaccatgcccggcaggataaagccctgctcgggggcgatcacgtgttcgataccttggcgtttgtcgaggatatccagcagttcaatgccgaagtcctggcagttttccgccaggtaggacacctgccgcgcgccgcccgcatcgggcatggtcgcgatgcgcttgggcgtggtggggttgacgtggtcgaccaccgccagtgccgtacccgggcgccatacgctgcgccccgcctcacgcaggccgctgaaggcctgggggctggtgtattcgttgatcacctggcggtctatataaagcaggacatggccctggtcatccagggcgcacaccgtgtgggaatcgatgtgtttgtcgtagagggttctggcagtcattttgttgggctcacttcacggtatggctccatcctacgcagcccctcgcccccatcaatggcacccgggtgatggcttggaacatgtttcgtgttcgatccaggctttgaaacgccgtgaatgtgaacctgaaacattttctttcatatccggcttagggttttgcgaatctcatccgtcttaacttagatacagcccgtcgcgtcagcaaaagctacgaccggccttttccgggcccccatcgccccctccgatcaagacccgcattcacatgtcgaagaagtctcgctcaaaactctggtttctcgtacacagctggctggcattgcccatctggttttttgtgctgattgtctgcgtcaccggcacgctggcggtggtcagccaggaaatcgtctggctggccaacccggacatccgtgccagcaaaccctcggatgacgccgaacccctgagctacgaccaggtcatcagcgcgatcaaacaggccgagccccaagtgatcgtgcaatcgctcagccgcccggacgaatcgcatttcgccctgagcgtcgacctcagctaccccgacgggcgttcgctggaggtctacgtcaacccctacaccggcgttatccagggcatcagcccctcgttcaacttcaagcaatttacccgcgcgctgcacggctggtggctggtgccgtttaccaatggctacagctggggctggtacctggtgtcgctgctcggcttgccattgctggcatcactggtcaccgggctggtggtgtacaagcggttctggaagggctttttcaaaccgaccctgcgcatccgccacggcgcacggatcttctggggggacttccaccgcctgagcggtatctggtcgatctggtttatcgccgtgatttccatcaccggcacctggtttttgatccaggcgattctgggggataaccagatttccatctccagcgaacctgtggtgccggtgattgcccgcgaaaaagtcccgacttcgacctcgggtgtaccggcgccgaccattgcactggatgaagccatcaagattgccacccagcgcatcccgggccttgaacccagcttcatcaacctgccgttcaacgcctacagccacctgcagattggcggccggggctggtacccgctgatgtaccagaccgcgcaaatcaacccgtatgacggtgaaatcgcctcgtcgcacctgctgtcagaccgcagcaagctggagtttgttaccgaatccatgcgtccgctgcacaccggcgacttcggcgggctgtggatcaagctgatctgggccttcttcggcctggtgctgagcttgatggtattgagcggcctgctgatctggaccaaacgcaccgccctggccaccctcaacgcgctcaagcgtgaagccaagtcacagcgccagcccgtttccatccaggccatgcaggctgaaacctcggaggccaatcgatgagcaaagttgccgctgtccccccttcgccgctgcgggccttttggctgaaatggcgcttccacatcaatgtgttgctgttgctggtgccgctgggtttcatgcccaggtactttgccgatgccgcactgtttcgcggggacaccgggatcggcgagcgtgttgtgggtgacgtacaggtcgggccctggagcctgaaactcgccgagttccgcaacgagggcccgcagcccgacccggccggcccgatcaagttcttcaacgccgccttgtgcgacacctgcgccgaccaggtcaaggccacttacctgcgcatcggcaagccgcgcagcctgcgggccgccggggttattttctttggcacaccgtaccgcatgggcgccgcgctgcccgtaccggaacgcacaccggccgacgctgaactgtggatcaccatggaaggctgggacggcagcctgcatcagggttccatcccgctgagccaggcctcgcctgccacccttgcctggctgaacaagaaaggagtcaaaccatgacgttgacaaacctgacccgcgccggtgtggcgcttttgctctgtgccggtttcagttctgtggccctggcccacaacccgatgtgcgaatgcaaggaaatcgccggcgaacagatccagtgcaccggcggtttctccgacggcagcggtgcgcccggcgtaaccctggatgtgatcggctacgacgaaaccatcctgctgcctggcaagcttggccaggactccacactgaccttcaagaaaccctccgccgaattctatgtgctgtttgatgcaggcccgggtcacgtggtggaaatcgaccaagcggatatccaggcgcaatgacgaccacacaggttgtacgccccgccggtgccggccatgaaaccctctacgtcctgctgctgtgcctgatcatcctcgcggtggctggcacggtggtggccttgcacggtgaaacccaagaggttgccgccgtgcccagccatcaactcgatgcgcgccgcgacctgagcgccgccgagcaaggcatctacgccgatttgcgcgtaaccctggatgaaatccagctgttgcagcaggagcaaaccaccctgccaacgcctgagcaactggctgaagaaggcttcgcgccgttcgcgcaggacgcgagctcagtcagccgcggcgaccaccgttggcaggtgctcgagccttcggcctacctgggcttgagccaaacgccggcgaccagcggctcgctgctgatgcgcgtgcacggcgccgagccggatatctggcttaaccggcaggccaacctcgccgcaccgtccgacctgactgacccggcgctgattgccgccggctggcagcaggtggtcacgcaattcgatgccggcgtgacccgccagcaccgccactgaacgagaagaccgatcgcccatgtctatttcatctcccctgttgcgcctgttgctggtcagcctgttcagcctgttgctcgctcctttggcgaacgccgaggcggccaaacgcctgcgcatcggcatcaccctgcacccttattacagctacgtcgccaatatcgtcggcgacaaggccgatgtggtgccgctgatcccggccggcttcaacccccatgcctacgaaccccgcgccgaagacatcaagcgcatcggcaccctcgatgtgatcgtgctcaatggcgtcggccatgatgacttcgccgaccgcatgatcgccaccagcgagcgcccggacatcccggtcatcgaagccaacgccaacgtgccgttgctggcggccaccggcaacgccgcacgcggtgcgggcaaggtggtcaacccgcacacgttcctgtcgatcagcgcctcgattgcccaggtcaacaacatcgcccgcgaactgggcaagctggacccggccaacgctaaggcctacacccagaacgcccgcgcctacggcaagcgcctgcgccagatgcgcgccgacgccctggccaagctgaccagtgcccccaacccggacctgcgcgtggccaccgtgcacgcggcctacgattacctgctgcgcgaatttggcctggaagtgaccgccgtggtcgaacccgctcacggtatcgagcccagcccgagccagttgaaaaagaccatcgatgaattgcgcgcactggatgtgaaggtgattttttcggaaatggatttcccttccacctacgtcgagaccattcagcgtgagtccggggtgaagctgtacccgctgtcgcatatttcctacggcgaatacacccctgaaaaatacgaagtggaaatgaccggcaacctcaataccgcggtccgcgcgattcaggagtcgggcgcatgacagcagccgaacacttgaaggtcgccagcctcggcccgaccctcgacttcgaccaggtatcgctgaccctgggccgcacagtgattctggacagcgtgagcttccaggtgcagccaggcagcatccatgcattggtcggcccgaacggcggcggcaaaagctcgctgatcaagacgttgctggggcaaacgccgcatcaggggcaattgcgcctgcactggccaggctcggtgggcaccgtcggttacgtgccgcaggccctggaattcgaccggggtttgccaatgaccgtcgacgatttcatggccgccatgtgtcagcggcgcccggcatttctcggcctgtccaggcactacgccgctgcgatgggtgaagcccttgagcgggtcggcatgcaggacaaacgcaagcggcgcatgggcgcgctgtccggcggcgagcgccagcgtgtgctgctcgctcaaggcctgattccggcgccgcacctgctggtgctggatgaaccgatgtcagccctcgacgaagccggtatccaggtattcgaacggttgctgaatgactggcgcctggccgggatcaccgtgctgtggatcgaacatgatctggacgcggtgggccgcctggccgatcgcgtcaccggcctgaaccgccgcgtgctgttcgacgccaccccccaagaagcgctgaccccggaccgcctgctgaccctgttctccacccacccccggagcccggcgccatgagttatgaagcgtttcgtctgatggtccagggctgggcctcttccgggtacctgccggaagcgctggcctatggttttgtagtcaacgccctgctcgccgggctgctgatcggcccggtactgggcggcctgggcacgctggtggtggtcaaacgctttgcgtttttctcggaggccgtggggcatgctgcgcttaccggcgtagccgtgggcattttgctcggcgaaccctacaccgggccgtacggcgccctgttcggctactgcctgctgttcggcatcctgctcaactacctgcgcaaccgcaccgggctggcgccggataccctgatcggcgtgttcctctcggtgtccctggccctgggcgcaagtttgctgctgattctcgccggcaagatcaacgtgcatattctggaaaacgtgctgttcggctcggtgctgacggtgaacggcaatgacctgctggtgctggcgattgtcggctcactggtgatggccctcgctctgccgttgtacaaccgcatcatgctcgccagcttcaacccgcaactcgccgccgtgcgtggcgtggcggtgaaaaccctggattatctgttcgtgattctggtgacgctgattaccgtggcggcggtcaaagtgatcggcgcgattctggtaggtgcgttgctggtgattccagccgctgcggcgcgcctgctgagccagtcgctcagggggttcttctgggtttcggtggtgatcgccaccgtcagcaccctgtgcggcattctgctgccgatcatgttcgacctgcccattccatccggcgccgcgatcattctggtggccggtatcgccttcgccctcgccgccatcgcgcgcggcacggtgcccagcctcaaagggaatcttggataatgcgccctgtctttcgcccattggccgtcatcattgcgtgtttgatcagcaactcagcactggccatcgacggcttcgaccccaaagacttcaaagtcaaccaaggcctcggccacgcggccctgaccaaggcgaaaaagccggtcacggtgctggcctcgctgcccatcacttacggcttggccgacgtgctgctcaaaggcaccaaggtgcaccttgagcgcgccgcgccggccaacctgcccggctcgcggcaggtggcctacttcaccggccggggtgctccggcgctgaatgcgcttgcccgggacgccgacgcagccattggcctgcgctcactatgggcggatgacccgctctatccggtggcgcggcgcagcaacatccgcatcgtcgaagtcgacgccgcacgccccgtggacggcggcctgccgggaattgccgtacaacccggcacagccgatggcctgaacagccagccgtggcagtccagcaacaacatggggcgcatggccgatgtgatggccgccgacctgagccgtttggcgccagaggccaaaccgaagatcgacgccaacctcgccgccctcaagcagcgtctgctcaagctaaccgctgacagcgaagcgcggctggccaaagcggacaacctcagcgtggtcagcctgagcgaccatttcgcgtatctggtcagcagtttgaacctggaagtggtcagcactgatgcacggccagacgccgactggtcgcccgacgccctgcagaaactcagtgccgaattgaaggacagcgacgtggccgtggtgctgcatcatcgccagccgagtgaggcggtgaaagccgcggtgacggcaggtggtgcgcagttgctggtattgaatgtcgacggcgccgacccggtgacggagctggaatccaatgttgatcagctgatcaaggcactcgccctgtaggcgttacgctgtgcaaatgtgggagctggcttgcctgcgatagcatcacctcggttcgccagatgtaccgaggcgcccaaatcgcaggcaagccagctcccacatttggcttgagtggcatccgttcaaccagcccagacccacctgtcaaaccacatccaccccgacatgaatcgcatcatgccgccagaactccaggtcgcagtcgatcaaccgctggtgctggtcataattgacccgggcgatgcgcaggcccgggctgcccaccgacacacgcaatgtggcggccgcttccaccggcaaggaagtcggcacaatctcgaaacgcaccctcccgtagtgcaggtcgtacttgcgggcatacaactcggtcatcgacttattcaggtcacactccagaatccccggaaaatactgcgggttcaggtagtgctctacatacagcaccaaacgcccatcaatgcgccggccccggcaaatctggatcacgctcgacagcgccggcaactgcagccacgcacacaccgccgccgacgccggttgcaaccgcgcagaaatcacctcggtcaccgccacccgcccctgctcactgaccatcgcgtgaaagtggctgcgctgcatcaggttgtaggccagccgtggcggcgagacaaaccagccgcgacgctcctcgcgataaatctggccctgtgcctccagctgtaacaaggcttcccgcacagtaatgcgagtggtaccaaacaactcgctgagcttgcgctcggcgggcaatttactcgcaggcggcaacaggccgtggtcgatctgctcttgcagcgccaggccgatggatgtcaccgccttgattgcctcatcacgcatcaacgttacctatctggactagaccagcaccgcctcggtgcacaaaccgcgcgctatttgggcgtctgctactgcgtgccagcctaggcattacagatgaccgacagatgacagtccgtgtgcaccccgctcaccacaccctgcaatacatcggccaagtccagggcctgcgggcacttgggcatggtctacgctgagcctgaaccaagcgacaaaagcgatttaaaaacgacatcgacatgaaactgtcatccattacgcctagattggctcaggtattgctgacctagaccaacaccaccgcaatcgttcataaaaacgcagcgttgaacacgcccaaaggagcttcggatgaaacagcttttcctggcatcactgttaggctcgaccattgccatgtgcaccgccgccatggctgctgataccgatttgaaaaccttggaagccgccgcgaaagcggaaggcgccgtcaacagcgtcggcatgcccgatgactgggccaactggaaaggcacctgggatgacctggccaagacctacggcctcaagcacatcgataccgacatgagctcggcccaggaaatcgccaagttcgccgctgaaaaagacaacgccagcgccgacatcggtgacgtgggcgcggccttcggcccgattgcggtgaaacagggcgtggcccaaccctacaaaccgaccacttgggcacaagtgccggattgggcaaaagacaaagacggcaactgggccctggcttataccggcaccatcgcctttatcgtcaacaaaaaactgctgcacggctccgaagccccaaaaagctgggctgacctgaaaaccggcaaatacaaagtctccatcggtgacgtgagcaccgccgcccaagccgccaacggcgtactggctgccgcactggccaacggtggcgacgagaagaacatccagcctgcgctgctgatgtttgccgacattgccaagcagggtcgcctgtcgctggccaacccgaccatcgccaccatggaaaaaggcgaagtggaagtgggcgtggtctgggacttcaacggcctgagctacaaagccaagatggccaacccggatgactacgtggtgctgatcccgtcggacggctcggtgatttccggctacaccaccatcatcaacaaatacgccaagcacccgaacgccgccaagctgactcgcgaatacatcttcagcgacgccggccagaccaacctggcgcgcggcaacgcccgtccgattcgtgccgaacacctgaccctgccggctgacgtacaggccaagttgctgccgaacgagcagtacaagaaggtcacgccgatcaaggatgccgacgcttgggagaaaacctccaaggctctgccgcagaagtggcaggaagaagtcatcatcaatatgcagtaaggcttcacgcgcctggttaagtggaacgaggtcagtgtgggagctggcttgcctgcgatagcggtctgacattcaacatatatgtcgcctgatgcaccgctatcgcaggcaagccagctcccacatttgatccgagccctaccgaaaaaccgaatcaagcctacaagcctattagttgcggagccccagcccctatgaagcacaacgtcatccttgtggtgctcgacggcctgaactacgaggttgcccgacatgccatgggccatctccaggcctacatcggcgcaggacgcgcagcgctttacaaactggactgtgaactgcccgccctctcgcggccactgtatgagtgcatcctcaccggcgtgccaccgatcgacagcggcatcgtccacaacaatgtctcgcgcctgtcgaaccagcgcagcattttccattacgccaccgacgctggcctcagcacagcggcggcggcttaccactgggtcagcgagttgtataaccgcaccccctttattgccgcgcgggatcgtcataccgacgacaaagcgctgccgatccagcacgggcatttctactggaatgaccactacccggattcccacctgtttgccgacgctgaaagcctgcgccgcaaacacgcgccaaattttctcgtggtgcacccgatgaacattgatgatgcgggccacaagcatggcctcgatacgccgcaataccgcaacagcgcgcgttcggccgatatcatcctcgccgactacctgcaaggctggctcgacgccggttaccaggtgctggtgaccgccgaccacggcatgaacaacgatcgctcccacaacggcctgctgccggaagagcgtgaagtgccgttgtttgtgctgggctcggccttcagcttcgacccgtctgccagacctgagcaaaccgagctgtgcggcaccgtctgcgaactgctcggtgtgccccacgacaaacctgtatgccgggagctgttgaagtgaattccttaacccgtggcaaatggctggcgattttgtgcctggtgccctttgcgctgttctttatcgtgttcgaaattgccccgctggtgtgggtgttgatcaacagcctgcaatcagaagagtccggctggggcgtggccaacttcaccaagatcttcagctcgaagttctacctgcaggccatccagtacagcctggagatcagcttctattccagcgtgttcggcatcatcatctcggtgctcggcagttactcgctgcgccgtgtggatgggccgttgcgcaacttcgtaacagcgtttgccaacatgaccagcaactttgccggtgtgcctttggcgttcgccttcatcatcctgctgggcttcaacggcagcatcacgatcatgctcaagcaggccgggatcattcaggacttcaacctgtactccaagaccggcctgatcatcctctacacctacttccagatcccgttgggcgtattgctgctttacccggcctttgacgcactgcgcgaagactggcgtgaatcggcttctttgctcggcgccaacggctggcagttctggcggcacatcggcctgccggtactcaccccagccctgctcggcaccttcgtcatcctgctggccaacgccctcggcgcctatgccacggtatacgcgctgaccaccggcaacttcaacgtgctgccgatccgtatcgcggcgatggtctccggcgacatctccctggacccgaacatggccagcgccctggccgtggtgctggtggcgctgatgaccgtggtcaccgtggtccatcaactgctgctcaagaggagctaccatgtctcgcgctgaagccggcccggcctccctctaccatcgggtagtggtgtatctgttgtttgcgattttggtgttgccgctggtgggcacctttgtctactccattgccagcagctggtcggccactgtgctgccagccgggtttaccgtgaaatggtatgtgcagctgtggagcgacccacgttttctcgcggctttcggccagtcgctgctggtgtgcgtgggggcgctgatcctgtcggtggtgctgattctgccgttgctgttcgtggtgcattaccacttcccacggctcgatgcgctgatgaacatcctgatcctgttgcccttcgcggtgccgccagtggtgtcgtcggtggggttgctgcagctctacggctccgggccgctggctatggtgggtacgccgtggatcctgatcggctgctacttcaccgtggcgttgccgttcatgtaccgcgcgatcaccaacaacctgcaagccatcaacctgcgtgacctgatggacgcctcccaactgctcggcgccagcacctggcaggcggcgatcctggtggtgctgcccaacctgcgcaaaggcctgatggtcgcgctgctgctgtcgttctcgttcctgttcggcgagttcgtgttcgccaacatcctggtgggcacccgctacgagaccctgcaggtgtacctcaacaatatgcgcaacacgagtggccacttcaccagtgccatcgtgatctcctatttcttctttgtgctggtgctgacctgggccgccaatatcttgaacaaggacaaaagccaatgagcttcgtcagcgtccaacacctgcaaaaaggctacgccggcaccccggtgttcagtgacatcaattgcgaaatcgccaagggtgaattcgtcaccctgctcgggccgtccggatgcggtaaatccacgctgctgcgctgcattgccggcctgacgccggtggacagcgggaaaattctgctggacgggcaggacatcgtcccgctcagcccgcaaaaacgccacatcggcatggtgttccagagctacgcgctgttccccaacatgaccgtggaacagaacgtcgccttcggtttgcgcatgcaaaaggtcaacgccgacgacagccacaagcgcgtgcaggaagtgctgcaactggtggaactcaaagacctggccgggcgctacccgcaccagatgtctggcggccagtgccagcgcgtggccctcgcccgctcactggtgacccgtccgcgcctgttgttgctcgatgaaccgctgtcggcgctggatgcacggattcgcaaacacctgcgcgaacagatccgccagatccagcgcgaactggggctgaccacgattttcgtgacccatgaccaggaagaagccctgaccatgtcagaccgtatcttcctgatgaaccagggcaagatcgtgcagagcggcgacgcagaaaccctctacaccgcgccggtggatgtgttcgcggcgggctttatcggcaactacaacctgctggacgccgacaaggccactcaactgctgcaacggcccatcagcgggcgcattgcgattcgcccggaagccatcgaactgagccgctgcggcgaactcgatgcactggtgcgcagccacagcctgttgggcaacgtgattcgctatcgcatcgaagcccgcggcgtggagctggtggtggatgtgctcaaccgttcggccgacgatttgcacccggacgggcaacgcctggcactgtccatcgacccaagtgccctgtgtgaagtagcctgatgcaacgattgattgagagagcgtgaccgatggcattggtaatttttgatctggacgacaccctcatccacggtgactgcgccaccctgtggagcgagcagatgggccgcctgggctgggtcgaccctgagtcgttcatgcgcaagaacaacgaattgatggacgcctacagccagggcaagctgctgatggaagacttcatgaccttcagcctggagccgatgatcggccgcacaccggaggaaatcgagcacttggtggagccatgggttgaggatgttatcgagccactgatctacagcgacgccaccaaaaccatcgcgcggcatcgcgcgaacggcgaccggattctggtgatttctgcgtcgggcacgcacctggtcacgccgattgccgcgcgcattggtattgatgaggtgctggggattgatctggacgtcagccatggtgtgtacagcggacatacggtgggcgtgctgacgtatcgcgagggcaagatcacgcgcttgctggaatggctggaacaggaaggtgagacgctggagggtgcatacttttactcggactcgcgcaatgatttgccgctgttaagcaaagtggcgtccccgcaggtggtcaaccctgacccggtgctgcgcgagcttgccgaaaaggccggttggccgatccaccactgggcctgatgctgacctcgctgatttgaaatgcaatcaactgtgggagctggcttgcctgcgataacggtacatcagatgaaatattcttcactgacacaccgccatcgcgggcaagcccggctcccacactgactgcatttcaacttgagatcaggtcaggctttcgtcaatcaccaacaccagcttcccggaaatctgattgcccgccagttcggcaaacgccgcctcggcgtccttgatcgggtaggttttagccaattgcgggctcaagcgcccttccacaaacagcggccacacgtgctggctcaagtcactgaacaagtccgccttgaactgatcgctacggctgcgcaaggtcgagccgagcagttgaatccgcttgccgagcacctgcgccaggtccagttgtgcgtcgcgcccgcccatcaaaccgatcaacacccaacggccgtccagcgccaacagcttgaggtccagcgcggcgtaattgccgcctaccgggtcgaggatcacatcaaacgggccgaaatcccgcagcccgtcgaggccgtcggtacgcaccacacccccctgggcgcctagtgcttcgcagtacgccaggcgttccgccgagccgacactgacccagcacgggctgccaaacgccttgcacagctggattgccgccgagccgacgccgctggcgccggcatgcagcaaaaccttctcacccggcttgaggccggccagctggaacaggttgagccacgcggtgctgtacacctccggcagcgccgccgcttcgatcagcgacaaaccctcgggcaccggcagcacgtgacgagcgtccaccaccacttcttcggccatgccgccaccggccagcagcgcgcagacccgatcacccacttgccacgaagaccccgcccccacttcgctgatcaccccggcgcactcaagccccagcacctggctcgcacccggcggtggtggatagagccccgaacgctgtaataaatcggcgcgattgaggcccgcagccgccacgcgaatgcgaacttggcctacatcgcaggcaggacgggtttcatccaaccactccacgtgaccgtcaacgccttgcaatgctttcacagtgcctccatagtgagtctggactgagcccgtagctgtagcgccgggctttttgcattatgcgaccggaccatatggaaccggctccctcaaagacggcctaatatgcgttatcaattgcccccgcgtcgaatcagcatgaagcatttgttcccaagcaccgcactcgcttttttcattggtctcggcttcgcgtcgatgtcgaccaatacgttcgcagccaacagctgggacaaccttcagcctgatcgcgatgaggtgattgccagccttaacgtcgtcgagttgctcaagcgccatcactacagcaagccgcctctggacgacgctcgctcggtgatcatctacgacagctacctcaagctgctggacccgtcgcgcagctacttcctggccagcgatatcgctgagttcgacaagtggaagacgcagttcgacgacttcctcaagagcggcgacctgcagcccggtttcaccatctacaagcgttacctggaccgcgtgaaagcgcgtctggacttcgcgttggccgagctggacaaaggcgtcgacaagctcgacttcacccagaaggaaacccttctggtggaccgcaaggacgccccttggctgaccagcaccgccgccctcgacgacctgtggcgcaaacgcgtcaaggacgaggtgctgcgcctgaagatcgccggcaaagagccgaaggccattcaagagctgctgaccaagcgctacaagaatcagctggcacgtctggaccagacccgtgccgaagatatcttccaggcgtacatcaacaccttcgcgatgtcctacgatccgcacacgaactatctgtcaccggataacgcggaaaacttcgatatcaacatgagcctgtcactggaaggcatcggtgccgtcctgcaaagcgacaacgaccaggtgaagatcgtgcgtctggtgccggcaggtccggcagacaagaccaagcaggtcgccccggcggacaagatcatcggcgtggcccaggccgacaaagagatggtcgatgtggtcggctggcgcctggacgaagtggtcaagctgattcgcgggccgaaaggcagcgtggtgcgcctggaagtgattccgcacaccaatgcaccgaacgaccagaccagcaaaattgtttcgattacacgtgaagcggtgaagcttgaagaccaggccgtgcagaagcagatcctcaacctcaagcaggatggcaaggactacaagctgggcgtaatcgtgatcccggccttctaccttgacttcaaggcgttccgtgccggtgacccggactacaagtccaccacccgcgacgtgaagaaaatcctgacggaactgcagaaagacaaagtcgacggcgtggtcatcgacctgcgcaacaacggcggcggttccctgcaggaagccaccgagctgaccagcctgtttatcgacaaaggtccgaccgtgttggtacgcaacgctgacggccgtgtcgacgtgctggaagacgagaacccgggcgccttctacaaaggcccgatggcgctgctggtcaaccgcctctcggcttcggcttcggagattttcgccggcgccatgcaggactaccaccgcgcgttgatcatcggcggccagactttcggcaaaggcaccgtgcaaaccattcagccgctgaaccatggcgagcttaagctgacgttggccaagttctaccgggtttccgggcagagcacccagcatcagggcgtgctgccggacgtagacttcccgtcgatcatcgacaccaaggaaatcggcgaaagcgccctgcccgaggccatgccgtgggacaccatccgccctgcgatcaagccggctgtggacccgttcaaaccttttatcgcgcagttgaaagctgaccacgatacccgctccgccaaggatgccgagttcgtgtttatccgcgacaaactggccctggccaagaagctgatggaagaaaaaaccgtcagcctcaacgaagcggaccgtcgtgcacagcacaccagcatcgagaatcaacagcttgttctggaaaacacccgccgcaaggcaaaaggtgaagacccgctcaaggaactgaagaaagaagatgaagatgcgctgccggccgaagcagaaaaaaccaagccggaagacgacgcttacctggccgagacgggccggatcctgctggactacctgaaaatcagcaagcaggtggccaagcagtaagtgatggcaatttaatgtgagcgctccccggagtgtcatcatatagacatcattctgtcgtgaaatgaaggaccgcaggctcaccgcctgcggtccttttttttcgatcgagatcgccatgaccatgaccgaacagctgaatgcattgggctcaatcctggctcaaggcagtttgcacagcctgttccaaccgatcatctgcttgtccgaacgacgcattctcggctacgaagccctcagccggggcccttcgaacagccccctgcactcccccgtcgcgctgttttccgtggccagccatgcggggcgcctcagcgaactggaaatggcctgccgcgaaagcgcgtgccgacgcttcagcgaacagaagctgccgggcaagctgtttctgaacatctcgccggaatctttgatggaaaccgcgcaccagccggggcgcacgctgcaactgttgcgcgacttcggcattccacccagccaggtggtgatcgaactcacggaacaaacccccaccgacgatttcgacctgctgcaaaccgccctgcaccattaccgcaacatgggctttgccatcgcgctggatgacttgggggccggctattccagcctgcgcttatggtcggagctgcgcccggattacgtgaagatcgaccgacatttcatcgacggtatccaccaggatgcactcaagcgcgaattcgtcggctcaatcctgcaaatcgccaaggcctctcgggcccaggtgattgccgaggggatcgagctgccggaagagctcgcggtgctgaccgagatgggcgtcgacctggttcagggctacttgctgtgccgcccccaggaacagccgccgcaggaagcgcgcctgatgctgcccaagcaggacaacgccaacgtcgccctcaacgaagaagccagcgacctcagcgccctgctcaacgagcaacccgcggtgggccaggacactgccaccgcccaggtgctggaatcctttcgccgccaggccaacctcaattcgctagcggtactggatgagcgtggccaccccgtgggcatcgtgcatcggcattcgctgtccgatgcgttgctcaagccattcgccaccgacctgttcgcacgcaaacccatcagccgcttgatgagcgatgattttctcgctgtggagttgagccagtccctgcagcaagtcagccgcctgctgaccagccgcgcacgccaacgcattgaagaagacttcatcatcacgttgaacggcgattatctgggcctgggccgggtgatcgatgtactcaagctgatcaccgagctgaaaatccagcaggcgcgatacgccaacccgctgaccctgctgccgggcaacgtaccgatccagcagtgcctgacgcggctgttgcagcaacagcgcgagtcggtgatctgttacgtggatatcgacagcttcaagccgttcaacgatatctacggctacgggcgcggggatgaggtgttgctgtgcctggcgcagtgcctgaacgaccgggtcgaccccagccgcgattttgtcgggcatatcggcggcgatgattttttgctggtgctgggcccacaggattggcgcaagcggctcaaccagttgctggatgattttcacacccagtgccggcgcttctaccgtgccgagcacctcgacgccggttgtttcgtggccttgaaccgccagggcgtgcgtcaggagttcgcgttgctgtcactgtcgattggcgtggtgcatttgtatccacaggcttgtggacaactggatgccagccagttggctgaactggcgtctcaggccaagcaccatgccaaagacgttgccggctacagcatccacgtgatcgacagtatggacatgctgccccaggcactctaagcctcagcagactccgggtactcgtattcgaacacccgcaccacttccgaagcgtgccaggacgcggcggcaacgccatcggaaggcccgctgaaccgccccaggcgctccacgcattcaaagaaaccggtgcgcggcaggcggcttgcgccctggctgatcaccaatgagctgcgaagcggctgctcggccttcgcgtccagcgcagccaggtgctcaagcgcagcggccagggtttgcatcgccggcgtgggaaattgcaggcgctccagcagcgcgcggtaggtcagcaaatggcgctggcgacgcgcctggtccagttcgttgattaacccatcccaatgttgacggctgatacgtaggctcaagattcatccctccaacctgcaacgcccaattcccaggccaggctgcggcgtatcgcggcatccggctggcgctcaccactttcaatcaatccgagatacgaggggctgatgcccacagtgcgggccagggcttcgatagccaggcccttggcctcacgcaggccgcgcaggtctgcgagagggcgcaagtccggctcggcagcggtgacagcgggagaaggagcaagagtgggcggctgctgaccggcggcttttagtagcgcctggtactggtcccatggcaacaccgcgtactcgggtgcgccatcgcgtgaaatgatctgaatatccatgactgccccgtaggataacaacacttactaagtaagttctttccttagaagtgtaatcctaacagccacaaaggtcgcagggggatatacgtgtcatccgtttttttgcgggttttcccgggccaacagttcaggcgtcgcaggcaggcgctcaaccaccgccagtttttccgggcgctgggcgtcgcgccaggcgcgaaaggcgctcagttcgccgtccagggtcttcatgacccatgccagcacggcaatgtcatcgagcatgccaaacacggggataaagtcagggatcgcatcgatagggctgagaaagtacataagccccgccaccaccgagatcagggccttggggctgatcgcgcggtactcgccccgccagtaggccaggcacagggcctggagcaacttgagatcatccttgagcttgcccaggcggttgccctggcttgagcctttggcggccacggcaaacagcaaggtgggcaagcggccgcgacccagcaagcgcgcggccataggtaggaagcgggtgaaattgaagggtggtttcattcgtcactccagttccatacgacagaaaggttatccacacaaattgtggataaccttgtgaacagagcctgttttcatggctgaaagccacggactacaaggcttgcagtcagatcgggcattttttgcgcacataaaaaaaacccaagatttcattgacttggcgcggatgtgcgactacccgtgctcgagtcttatatcagactgtctcaggttggcgatgttcgatcggatttgcaaaggctgcaatttgaaagctccagaaacaacaacgccccgtcgggacggggcgttgtgtgtgttcagccgctgattacttcttggcggcaggtgcagccggtgcgtcaggggcttcagccttggctgggtccttgatggccagcagttccaggtcgaataccagcacggagttggctggaatcgccgggctcgggctctgcgcgccgtaagccaggtcggacgggatgtagagttcgaccttctcgcccacatgcatcagttgcaggccttcgacccaacccgggatcacgccgctgaccggcaggtcaatcgggctgccgcgatccacggagctgtcaaaggtagtaccgttggtgagcttgccggtgtagtgaacagtcactacgtcggtaggcttgggctgagcgccgtcggccttcttcacgatcttgtactgcagaccggaagcggtggtcactacgccgtctttcttggcgttgtcttcgaggaatttcttgccggcggctgccgactcttcactcatcttggtcatgcgttcttcagcacgcttttgcagtgcggcaaacgcttcaaccagctcgtcgtctttcagcttctgttctttcttgccgacggcatcttcgatgccttgggctaccgctttggagtccaggtcatccatgccttcttgggcaaggcttttgcccatgttcaggccgatgccgtaggaagctttctgcgccggggttttcagctctacgctggtctgcgaatcacaacccgcaagtaccaggctaaccagggccaccgccgccgccaaccgatgctgtttcatgctatttccttgttcgtgcgccaaaagggcattcgagtaaagtcgcgagcttatcaggcggccacgaccaatggctaccggcatctgaggaggaaacttctgataagttcacgtgtttaaaagcaatttcattcattatggtcatccgcgacggatcgcgggaccacctgagcccaggctaatggccacttgccgcacctgtggctcaatggcataagaacgcaacaactcgacaaggatagttatcttgcgcattttttaccgtgtattacttctgatacttatagccctcggcctgcttctggccgtggtgctctattacaccctcaaccccaagttgccggactacgtgcccgtggaccaggtgcactaccaggatcaatggagtgccgccgaccgccagacctactacttcacgccccaaggcacccaagtaaaaggcctgcattacgactggtttaccgccctggaattgcccttcgccaaggagcgttttgccacgccggaatacctcgcgcgcttcgggtttctcgtagaccccaagcaagtccccactccgcaaaaccccggcaacctgcccgtgggtttcgcccgccatcagaacgccggcagccaggtcgaatacctggacatcacctgcgccgcttgccacaccggcgagctgcatttcaaaggccaggccctgcgcatcgatggcggttcggcccaacatgtgttgccctccagcgtgcccacgctgcgcggcggcagctttggccaggcgttggtggccagcctggccgccacctattacatgccctggaaattcgaccgtttcgcccgcgcagtgctcggtcatgactacgacgagcacaacaaaaacctgctgcgccaggacttcaaacagtcgctgaaccagttcctcaaagttgcctggaacgacacccaccgcggcctttaccccaccgaagaaggcccggggcgcaccgacgcgttcggccgcatcgccaacgccagctttggcgatgccatctcgccagagaattatcgtgtcgccaacgcccccgtggattacccacacctgtgggatatctggacctttgactgggtgcaatggaacggttcggcccagcaacccatggcacgcaatatcggcgaagcccttggcgttggcgctacgctgaccttcttcgacagcgccggccagcccctgcaaggcgacgcccgttacccctccagcgtgcgcgtgcgcgacctgaacctgatcgaagaaaccctgcaacgcctcaaaccgccgacctggcccgaagacctgttcggcgccgtcgataaaccccttgccgcccagggccgcgcgctgtttgccgaaaactgtgcaggttgccacgtgccaaccgtcacccaggaaaacggccgcccggtgcagcaactgaaaatgcttcccgtggactacatcggcaccgacccgggcgccgccagcaacatcgccgaccagcgctatgacctgagcgccctgcaatgggaccctgcggaactggccaaactcaacgtcgaactgcacccgacgcccaccgaacccctggacctgacaaaaatgtcggtggccaaaggcctggcctacgtcaccgcgttcgtggaagcgcacgcctaccgcgccgccggtgtcaccccggccgaacgcccgcgcctggacggctatggcttgcccatcggcgtacgcgaactgcgcgcctacaaggcgcggccactggccggcatctgggcgactccaccgtttttgcacaacggctcggtgccgacactctaccaactgctctcgccccaggacgagcgcagcgccaccttctacaaaggcacttttgactacgacccacgccacctgggcttccagactggcgcgttcaagaatgcctttttgttcgatacccaaatcaccggcaaccacaacagcggccacgaattccgtgccggccggcgtggcaatggcgtgatcggccgcagcctgctgccgcaggaacgctgggcgctgctggaatacctcaaagtgctgggcggcccgctggagcaacaactgccatgatgattcgatcgccatacaacgaacgctccctcctcgctcgcctctggctgggcctgggcaaatttctcggcaagacgctgctgtggctggcgggcctgggcttgctcggctggctggcggccaccgcttggttcgcctggcagcacagcggcccggtgtcgccgaacgagcagatcccgcccggtgaagcggcgatgacccaaggcatcatccagacggcggtgcgcatcgtcgatcagcaccgtgagggcacgcgctacctgcgcgatgcccacgccaaggcccacggctgcgtgaaagccgaagtcagcgtgctggccgacctcgacccggctctgcgtcagggcgtgttcgccgagccgggcaagacctggcaggcgatgatgcggctgtccaacggcaacgcctacccgcagttcgacagcatccgcgatgcacgcggcatggcgatcaagctgttggacgtgccgggcaaacagctgatggccgaccagcaggcgcgcacggagcaggatttcgtgatgttcagccacccgaacttctttgtcagcgatgtggcggaatacgcgcagaacatcggcgcccaggcggatggcaaaaaagtgctggcgttcttccccaaggctgacccgcgcagctggcaggtgcgccacctgtttatcgccctggcgaccctggccccggcgcccgccagcccgacacagacgacgtacttttcagtgtcgccctacaagttcggcgcggccaacgccaagttccgcgtcgccccggacccgcaaagctgcccgcaatacgtgctgcccaaacagaacgaagacctgccgaatttcctgcgcagcgccctgaaccagcaactgtccaccgaccgtgtaccggcgtgtttcgtgttgcagatccagcgccagaaccctcaaaagttcatgcccatcgaagacaccagcattgaatggaaggaaagcgatgcgccgtatgagacggtggccaaggtgaagattcctgcccaggatttcgacacacaggccttgaacctggcgtgcgacaaccaatcgttcaacccttggtttggcgtggaagaacaccgccccatcggcggcatcaaccggttgcgcaaggcggtgtatgaagccgtcagcgactaccggcacagccgcaaccagtgacacccgcgcggccctcgcagggccgccacaccgggccaaccgtaaagtctgcgtatgattttgcggttcgccataacgattgcgtcgtgcctgttgagtgacaaagcccacgggatttatcgtcgtttcctaccccaaaacccgtaggaaattcatcgtggaaagttcaactttaggcatggtcgtcctgtcaatgattgcgctcttcggcaccgccgcgttttgtttcgagcacctcgccacccgcgatgaaaagaaaaagaaacccgaacaaaccgaccgttgagcccaagcctgccgttgcggcaggctcatcgcgccgggttagaaatggaacgccacgcctgtggtcacgttaaacgcatcccccacgtagaagttggccgagtcctggcccttggcgtcatacgccgtgttagtggcggtcgcgtagcgtttgttggtcaggttgcgggcgtcgacaaacacctcccattttttactcggggcctcgtagccgaccttggcgccccatagcgtgtaggacggcgcactcagggagttggcaaagtcgacgtaatagctcgacgccgcccgggcattgagttgcgcatagaaaccgctgccctgacgatattccagctcggcctggtagacctgacgcggcaggcccggcagttggttgtcaccgaataccgagtcattgcggtagtggaagtcattgaaggtataagcctggcgcaatgtcaccgtgtcgccattgccgccgtcccacaactgcgcgttcaacccggcttcgacgccctggtgaatcgtggcgctgccattggacgtagccaccaactggtcctgagtcgccgtcgcctggcgtaccaccaccgacagcagttctttctgaacccacgagcggtaaaccgtcaggctgccatcgaaaatgccatgaccgccgcgaatgccaaactccaccgtgttggctttttgtggccgtacatcgcgaatgtaaggcgtaccggtactgcccaactgccaggtgaccggcggatcgacggagcggctgacgttgccgaacacttcgaattccggggtcagctggtagcgcagcccaatgcgcggggcgacgtcggtctcgtcgtattcgacgccactgggaaacgcgctggtgttggtgccggtgctgtattcgatctgcgccttgcgcttgatatcgatcagcgacagcccggtggacaaccacgtacggtcattcaattgcagctcgttgccgagggaaaatacggtgtcgcgcgagccggtatagtctgttttctgttgcgtgatgccggtggcccggctgtgggatttcacgtcagccaggtaagacaacgtgttgctgaaggtcacgctgctgtcgctgcgcaggccgaagactgtgtcggcggtgcgcaggtagcgcagggtcaggttgacgtcctgggaacgccattcctgaggggtgggcgaatagcgccagccgttgtccagcggatagtcgttgtaacccaggcccacttccagcttggcgttgtcgtcgaacgtgtaggtggtcgtgctgcccagcagcgtcgagccgtccttcttgcgcccgatagggacaaggttgctggtggggtcgtgcttgagttggtacttggtcagggtgttgccctggctgagggtttcctctttgtagcggagatagaaacgcgtctccagttgcgggctgaacacgtgcccgaagttggcgacgatcccctgccctttgtttggcgtgttgtcttgatacccctcgcgttcgttgtgctgcaggctgatgtagtagtcgttgtcgccgtccacgccgccggtgctcagttgctgcttgcgatagccaaagctgccggcctcaaagcgtgcgtaattgcccgggtcggtgcggccggtcttgctcacgaagttgatggcgccgcccagtgacaacgcgctatagcgaaacgcgttggcgccgtagagcacttcggtgtggtccaccgaggccatgtcgagcatgtcttcctgggtaccaccggggccggtcagcggcaggccgtcgtagagaaatttgatccccagcacatagccttgatagaaggtgttgaggcccgaaccccggatcgaaatcttgttggcacccgagccgctggtggcctgggcgaatacgcccggctgcaacgccaacacatcctcggcatttgcagcacggccctgctcgattttgcggttatcgatcaccgcggttttaccgggcactttgctcagttgctgctcggccttttgtgcttcagtggcttgagcaccggtgaccaccaccgtggccagggtcgggtcagcctgcgcagcgaaggccgcaccttgtaccagcagcaacagcacgccaaggctggaagccgtggccagtgactcaaaacgacgagcgcgtggttcaaacagttgccgcatgaattaaatactccgggggtttgcgattagttggagcatctattcgtatagtcgcgctctgattttaacttagcagggtttgtgccacctcaaaacattcaataaatacaggcctgcgcggaaaaaaccacgcaacaagaccaacactttgctggtgaaatgttcgtttccaaacactaataaagacacactattgattctatgcttaatcgataaaagcataacgaacaccccgccgcacggcacttccaactgtgcgaaagccaacagcccgccaacaaaagttgcttatcggacaatcaggatggctgcaaaaaccgcaaaagccacacgtcatccaaccgttgttacttggtatgggttttgctctaccactgcacaactttattgaatccattcacgcagtgacgattatcaaacaacgaggtatgacgcgtgacggtgaacttactccacacccgcaggacgccactggagattgcccgtgggctggcgaccgagttcgcccgcaccgccgtcgaccgtgatgccatcggcggcacgcccaaagccgaacgcgacaagctgcgcgccagtggcctgttgtccctgagcattccggggcaatttggcgggctgggcgccaactggtcggaaaccttcgaagtggtacgcgagtttgcccgggtcgacagttccatcgcccacgtcttcggctttcatcacctgatgctcgccaccgtccgcttgtttgcgacccccgcacaatggcaaacctggttcagcctgaccgccagcaacaactggttctggggcaataccctgaacccgctggatacgcgcacggtggtcaagcgccacagtggctggcgcgaattttccgggcagaaaaacttctgctcgggtgccaacgactccgagatgctgattgcctcggccatcgatgaaaacgcaggcggcacgttgctgatcgcagccattcccagcgggcgcagcggcatcatcctgcacaacgactggcacaacatgggtcagcgccagaccgacagcggcagcgtgaccttcaagcgtgtacgggtggaagaatccgacctgctgctcgaccccggcccgctgagcacgcccttcgcctgcctgcgcccgctgatcgcacagctgcacttcgccaatattttcctgggcatcgccgaaggcgcgttcgaggaggcgcgccactacaccctcgaagaggcgcgaccatggtttcgctcaaccgccacccgcagccatcaagatccgtatgtgctcagtcactacggcgacttctggattgccctgcaaagcgcccggctgctggtggaccgcgccggtgtgctgctggatgcggcatgggccaagggcgcggcgctgaccgccgaagagcgcagcgaagccgcgattgcgattgccaccgccaaagtcgtcgccaaccgcaacggcctggagttgtgtagcaaggtcttcgaggtcaccggggcgcgtgccactaacgcctcggtggcgctcgaccggcactggcgcaacctgcgcacccagagcctgcatgacccgctggactacaagcttcatgaactgggcgaatgggcactgaacggtaccccgcccgtcccgactttttattcatgatcttttattcaaaggcccctccatgcaactgctgacgttaccgccctcgcccgccctcgccacctcgatccgcgccacggcgcaggtgtttgaagaccccaggtccaaggcgttgctgcaacatgtgcaacaagtcgcgcccagcgaagccagcgtgctgatcattggtgaaaccggcaccggcaaggagctggtggcgcgccatatccataacctcagcggccgcaaggcgcagcctttcgtggcagtcaattgcggcgcgttttccgaatcattggtggaagccgaactgttcggccacgaaaaaggtgcgttcaccggggccttgagcgccaaggccggctggtttgaagaggccaacggcggcacgctgttcctggatgaaatcggtgacttgccgatgtcgatccaggtcaagctgctgcgggtgttgcaagagcgcgaggtggtacgcctgggctcgcgcaaaagcattgcgatcaatgtgcgggtgctggcggccaccaatgtgcagctggaaaaagccatcaacgccgggcattttcgcgaggacctgttctaccgcctgaacgtggtgaacctggtgctcagcccgctccgggaccgccccggtgacatcctgcctctggtgcactatttcatcggcacctacagccgccgcctcggttacgtcgagattgttctcggcaaggaggccgagcaacggcttgccacttacagctggcccgggaacattcgcgaactggaaaacgtcatccaccacaccctgctgatctgccgtgacggcgtgatccaggccgatgacctgcgcatgtccaacctgcgtatcgagcgccaggaagacagccacacggcgcacgatttgctcgagcaggccttccagcggctgttcgaagaacaggtcgacaacctccacgaacaggtcgaacgcagcctgctgagcgccgcttaccggctctgccagcacaaccaggtgcacaccgccgagttgctggggctgagccgcaacgtgacgcgcaccttgctgatcaacctgggcgagctgaaggtcaacaagcgccgctcgccggtcaccgccaaggatgaccgggtgctgcacctgtcgatctgactcgcgcctgacgccgctggatcacagcgccacttcgtccagcgcgtcgctgaactggcggctccacagccgcgcgtattggccgccctggcgcagtaactgctcgtggctgccatcctcgaccacccgcccgttgtcgaacaccagaatccggtccagatgggccacggtagacagccgatgcgcgaccaccagcacagtcttgtcttccatgatttcgtcgagtttgtcctggataaaccgctcggtgatcgagtccaggctggaggtggcttcgtccatcaccaggatcggcgcgtttttgagcaacacccgcgcaatcgcaatgcgctggcgttggccaccggacagcttgaccccacgctcgccgaccagcgactcgtagccctgctccatgctgtcgataaactcactggcgccggcgcgatgaatggcctcggccacctcctccatcgacgcgtccagccgcccgtaatgaatgttctcgcggatgctgcggtgaaacagcccgggctcctggggaatcaggccgatctgctggtgcagcgagtgctgggtgacctcacgcacgtccttgccatccaccagcacctggccgttctgcacgtcgtagaggcgcagcagcacgctcaacagcgttgacttgccggaacccgaagcgcccaccaacccgactttctgaccggcaggaatcacgatgttcaggtgctcgaaaaccggccggccactgccgtagctgaagcccacatcgcgaaactcgatatcgccgcgctcgacctgcagcgccttggcacccggtgcgtcaatgacctcatgggggcgaatcagggtgcgtacgccgttggcgatattgccggtggcttcgaagaactccagaaagcgccgggacaagttgcccacatcactgatgatcagcagcgacaggctggtagccatcacaaacgccgcgatgtcgatgcgctgggtgcgccacaggtacagcgccagcagcaacagacccagtttgagcaccacgccgcagctggtctggaaccagcggatgcgctccatgtaaccgagggaacggtaagcggcggtcacctccttgtcgaggaaggtccccaggtaactgtgctcgaacgcatgccgggcaaacaggcggatattggccaggttggacaccgcatcgaccaccttgccggtactggtgctgcgcgccgccgaatactgctgtgccagaggatggctgcggcgcgcgagcaggtagcagatggcgatgaacaccaccgaccagccggccatgaacagcgccagcaacggtgacgcggtccacagcaatgccgtggccaggctcagcgtcaccagcaacgggatcaggtcgaacagcacaatgctcagcgtctggttgacccccagcgtcacttcagacacccggtgcgccagggcaccggcaaactcgttactgataaaccggtgagagtgctgttgcaggtaggcaaataccgtgtgggtcaccgtatgccgctgcaagggcaacacatggatatggcagcccgccgccgcgcgggtgaacaacacttcgcacaccagcagcccggcgaacagggtcaacggccattgcagcacctcaaacgcgcgctgcgcctccagcccgttgctgacggtgcgcgtgatttgccccagcccccacgggatcagaatcgaacacaccaccgccgcaatctgcagcagcagaatggccaggtaccaggctttgaaatgaccgatgaaatgccgtacaaacgccgccggtgttgccggcaagtgttggacattccacgtacgaaacgatgaaaaagacgcgttcatggccgattgaattcctgaatgacgcctgtggccgcgcagctttcaggcaaaaaatgggggtttgaacgttcccgcgcaaggcccgggaacgatcatcaccctgctcgtttcacatacaccgccgagcccgcctgcggcgacagcctgcgatagaccagccccgacaatgcgcataacaacccggcgcccgccatgatccaggcgatatcactttgctgaacgctggcatgcccgcgtaccgccatgatcaaacccaacagcgccgccgcaattcccaccgacaggctcagcgtcagctgaatggtcatcgccgacaggctgctggcgcggctggattgctccggcggcacgtcggcgtaggtcaaggcccccagggtgctgaattgcagcgagcgaatgatgccgctggcaaacagcacaagcaccacgatccagtacggcgtggaaacgtcgaacagcccacaggcgacgatggtcatgccggtgagcacggcgttgccgatcagcgtgcgcctgaaaccgaagcggctgacgattcgcgtcgccagcatcttcatcaggaacgccccggcgccaccggcaaaactcagcaaacccgcctgcaacgggttaagcccgaaacacagctggaacagcagcaccagcaagaagggttgtgaggcgctgccgatgcgcatcaggttgccgccccagaacgtcaccgcaaacgtcggtatcttcagcagtgacaggtcgatcaacgggtgcgccgtgcgccgtgcgtgccgcgcatacagccacgcactcaacagccccacgccaatcatcagcaacgcccactgccgcgccaacaggccatggcccaacacttcaaaaccaaacaccagcccgcccagcgccacactgctgagacataacccgacaatatccaatggctgacgcggcgctcccgggtaatcggggatatagcgcagcaccagccacacgccgaacaccccgatgggcaggttgatcaagaagatccagtgccaggacagcagcgtcaccaacagcccgcccaagggcggcccgagcagcggccccaccagtgccgccaccgtcaggtaggacatggcacgcagcaggttttcccgcgccgaccagcgcagcaggatcacctgccctaccggcaccatcatcgcccccgccgcaccctggaccatacgcgccagggacaattgcagcagcgaagccgaaccggcgcaggccaccgacgccaggataaacagcacaatggcgctgataaaaacccggcgcggcccgaaccggtcggccgcccaaccgctgaccggtacaaacaaggcgaccgccagcaggtacaacgacaccaccaggttcatgcgcacactgggctcgccgaaatcccgcgccatctgcggcaaggccgtgagcacggcagtggcgtcgatcagttccatgaacaacgcacagccgatgatcatcggcacccgccgcgaatggcctgtgcccgtctcgctcaaggcgcgtgaaacttcagattggagggcgttattcaaaacagccccgaagtcggtggcggcgtacctttgagttgccaggcgcccactgcggcggctttccagtgccgcgggttgtggttggcgacggtgcgcgcgttgcgccagtgacggtccaggttgtgcgcacggccggtggtggacgcgccgcccacatcgaacaccagctctgcggccttgagtgccgcctgcgccgcgatgtattgcgcctgggcgacatccaccgccgcctgatccaccgccaccgcgtccagctcagccgcccaggcgcgatcaatcgcctgcgccgcgtgcagcaccacggcttcggcagtaaaggcgcgggcggaaacatcacccacggtcagctccacatagggatcatccaccgagcgctgggcgctgctgtgcttgatcggccgcgcgtggtcgcgggcaaacgccaccgcatcattcagtgcgttacgtgcgataccggcctgcaccgccgcgaggaacacttgcaggaacggcgtgacaatcgtgcgtttgccctcctcgaccgtgcgggtgcggatctcgctggccaacacctgcacatcgtgcaaatgcgtggtgccgctggcggtcaggcgctggcccatggcgtcgaaatcatccagcagttccaggccctggcggtcgcgcggcaggatgaacgacaccggttgatcgttctcgtccagcgccaccgcgctgacccagtcggcatacaacgaaccggtgctgtaatacttgctgcccgaggcgcggtaatgctcaccgtcacgcacgatgcgcgcactgatcgagccattggcgccgcccacttcccagccggcattgccgatcaccgcaccttgcaggtaacgcgcaaaccaacgctcgcgttcgtcttcggcgccctcggcccgggaggccagcaacccttcgataaaaccaaagcctgggcgcaatgcctgggccacattggaatcagccgaggcaatacggatcagcaaggcaatcgcgtcgctgaccgaaccaccggcgccgccgaagcgcttgggaatgcgcacggtaaacagcccggccttggcgatctgcgccacggcctcgtaaggcaattggcgttcgcgctcgcgttgcgccgcgcctgccgcgatctgcggcagaatccggtcggcgcgggcgttcaattcagccaccgtcacactcggcggcgtgggtacagcagacaacttgctcatggcacttccttgattcaggtctagatggcgattttccacaggcgcgattcgtcaaacagccagccggggtgttccggctccagggccggcaccaccagctgcgcaccactgccgggcaggcgcggcaccgcgcccagcaggcgccgggtgtagtcgtgttggggcgactcgaacagcgcctcgacactggcgctttccaccacctggccgtggcgcatcaccagcacctcgtcactgacatggcggatcacgcccaggtcgtgggaaataaacaggtaggccagcccgagcgacgcttgcaggtcggcgagcaaatcgaggacttgggcctgcaccgacacatccagcgccgacaccggctcgtcacaaataatcactttggggttgctcgcaatcgcccgggcaatcgccacgcgctggcgttgcccgccggacaattgcaacgggcggcgcgcgaccaggtgcggcgcgaggcgaacctggtcgagcaactgcgccacacgggcggcctgttgttcggcgtcgatcccggccacgtccagtgcgtcactgaggatttgcccgacggtccagcgcgggtcgaaggagctgagcgggtcctggtagatcacgctgatgtcacggcgatgcaaacgtcgcgtgttctcctcgacgcgctccggccctgccgccgcccacggctggtcgagaaaacgcacctcaccggcatccggttgcagcagcccgagggcaatgcgcgccaccgtggttttgccggacccagattccccgacaatgcccagggtgcgcccggcgcgcagctcgaagctgacaccgtccaccacttggcgcgcctgttgatcggggccgacataacgcttgcccaggccgctggccttgagcactaccggcgaatccatgcccggccgtggctgcgtcaccgcagtgccgcgttccggtgacaggcgcgtaccccgcgcatgttcggcgggtaccgcgtccagcaacgaacgggtgtacgcatggcgtgggttgagcagcacttggtccatcggcccttgctcgaccacctcaccgtggcgcaacaccagtacttcgtcggccagttgcgcgaccaccgccaggtcatggctgatgatcagcagcgagtcaccccgcgccttgatctgctgcagcacctcgaggatctgcgcctgcaccgtggcatccagcgcggtggtcggttcatcggcgatgaccaggcccgggttcagcgccaaggcactggcgatcagcgcacgctggcgcaggccaccggagagttggtccgggcgctggcgggcacgcagccggggctcggggacgcctaccaggtcgagcagttcgataacccgttcaccccggctgcgccggtcgccccagcgatgggtttccaggacttcgagaatttccttgcccaccgggcgcagcgggtcgagcgacaccagggcgtcctgcaacacaaagccgatgtcgctgccccgcaattggcgccagccacgctccgacaggctgagcaaatccacgccaccgtaactcaaggcccgcgcagacaccctggcgcccgctcccgccagcccgatcaggctgcgcgcggtgacgcttttgcccgagccggattcgcccaccagcgccagggtcttgcccggctccagggtgaacgacacattgtgaacgacaggctgcccggcaaattcgatggacagcccttcgacgatcaagcgtttgtggtcgctcatgacagacggccctccaggcgttgctgcaagtaacggccagtgaccgtggtcgacaacgtcgtcagcacgatgaacagaccagggaaaaacgtcagccaccaggcgttggcaataaagtcacggcccatcgacaacatggtcccccactccggcgccggcgggcgggcgcccaggccgagaaaactcaaggccgaggcccacacgatcgcctgccccacgcccatcgtcagcgtcacaatcaacgggcgcatcgcgttgggcagcaactggcgcaagatgatgcgcagcggtgggtgcccgagggcgcgggccgcctcgatataacccgcgttgcgcactgccagcacctggccgcgcaccatccgtgcgtaacccggggcgctgcccaaaccggtggcgacgatcaacgggccgataccgctgccgaagatcgccacgaacagcagcgccagcaccaggctcggaaaggcaaacagcacctccagcagccagcccacgccacggtccgcacgcgcgccgccgaggccgccgagcaagccaagaacgatggcgatactcatcgcaatcgccgtggcggccaggccgataaacaacgactggcgagtgccgtagatcacccgtgaaaagatgtcccggcccgactggtcagtgccgaaccagtgggcccagctcggcgggtgaaaggcatcgcgcggcacgatggccagcgggtcgctgtaggcaaatacctgcggcaccaaggcggcggcaatcaccagcagtagaaaggtgatcgccaacagcgggccaagccgccaggtgcgaggggtgcgctgcacacgagaggcgggcagcggtgtttccagggtcaggccactcatgccgtcacctcctgttggcgagggtcgacccacaggtacagcaggtcgaccagaatattggccagtacatagccggcggcgaccaccaggctgataccgatagtcaacggcaggtcctgggcctgcaccgcctgatacaactggcggccgagccccttgcgggaaaaaatcacctcgatcaccaccgcgccactgatcagcgcgccgatggcccagcccgacaatgaaatgccgggcaataccgcgtgacgcaatgcgtgtttgaagcgcacgttgaagtcactcaggccacgggttcgggcggtcaggatgaagggttggtcgagggtcagatccagggattcgcgggtgacctgggcaataaacccggccagcggaatggccagggcaaacgacggcaacacgagggtgcgccaaccgtcgctgccagcgggcgggaacaggcgcaggccgaacgcaaacaccgccagcagcaaaatccccagccagaaatgcggcagcgcggcggccagggtttccgccagtgaagccaggctcgacacccagcgccggcgcccggcggtgagtaccgtcaaggccagcaccagcacccaggccagcaccagcgacgtcagggtcagttccagggtcggccaggcttgctccgccagcacccgtgtgaccggcaagtgttgggagtaggacacccccaggtcaccctgcaccagccgcccgaggtacaccgcgtattgcaccgccagcggcttgtccagcccgtattcacgggtggcttcggcgatggtctcggcggtggggttgccgctcgggccgccgaggatcgccagcaccgggtcacccggcatcaggcgcaaggcaaaaaaggtcagcgtggccacggcccacagcaccagcacgccgccggccaggcgccacacggcgcgtttgcccaggcgcgtcaggcgctcgcgccgtgggttggcaagtgatgtgcggctcatttgttcacccatgcgtcatagaggtaagtcaccgccagcgacggctccagccgcacgccctgggtggtcttgtagatacccagccgcgtgctttgcgggtaggtggtcaattgcaggtattggctcgatgcgattttctgcgcctggtaatacaaggcccggcgctgttcgctgtcctgggtggcgagggcctgttgggtcagcgtgtcgaacgccggatcactgaaacctgcggtgttctggtggtaaccgccgacgccggccgggcggatgaactcgctgccgaagatgatccgcaacacgtcggcggtgttggtgttccagtagcccaggcggatgtcgtaatcccagtcggcctggcgcttggtagcctgcacgtcactcatctggtcgacgatcagctcgaaaccggcttgccgggtggtggcctggacctgctcccacaaggtgaactccgaaggcggcgtgcggttgcccatcaccacatgcacctgcaggcgcttgccgtccttggtgcggtagccgtcgccgtcacgttgggtccagccggcctggtccagcaactgtgcggcccgggccgggtcgtaatcctgagcgtgctggaactccgggttgtagaagcgcgtggccgggctcaacgggccgccggcacgggggaattcgttgaagtacacgcttttcagcgcaccctcgatgtcggagctgcgcacaaaggcttcacgcacgcgcaggtcatcgaatggcgcacgggtgatgttcagcgtgccattggtggggttgccggggcgctgggcgatcaacagcgtgaggtccgggttgcgccgggcggcctcgtgagattcgggtggcaaggcttcgatcacatcgacctcgccggcctgcaacgaggcgaagcgcacggacggctcctggatgaacttccagacgatgcggtccagccacgccgggccctgatgtttggcggtcggcggtgcccagttgtaatccgggttgcgcaccagttcgacctggctctggcggtcccagcgcaccaccttgaacgggccgctgccgaccgggctttcacagttcacatcgcgcgagcgcaacagcgccgtgggcgactcgatcccgagaaaaccctgagccagcacctccagaaacgccgcgtaaggcgtggccagatgcaccaccgccgtggtgtcgtcgagcacgtcagtgctgcggtattggcgaatatagccgccggcggtgctggactgggttttggggttggccatgtgatcgaggttggccttgaccgccgccgcgttgaacggcgtgccgtcggtaaaatgcacgtcgtcgcgcaggtggaaggtgtaggtcaggccgtcgggcgagacctcccaggccttggcgagccaggggccgatgcggccgtcggcgtccatcgagaccagcgaatcgaggtactgctgcgcgacaaacacctgcggcatatcgccggccacatgggggtccaggcaagtcggttcacggtcggtggcgtacaccagggtgccgcccttcaccggctggtcactgcgcgcaacggtggagccgctttggccgcagccgaacagcagggaacagagcgcgacggcgacgacaaggcgggaatagggttgtcgcaggtatggggcgggttctcgcatgatgagggatgcctgaagtgcgggaacaggggcattgcacaaggcatgccgggttttgggggccgtaaacacggcacattgcgggttgagtggatgactgaaatcgacaatgtgtggggtgggtgttggttagccaacagcaggactgcccactgtgaaaaccgggcttgtgtgggagctggcttgtgtgggagccgggcttgcccgcgatggcatcacctcggtatgactgatagaccgaggtggctgcatcgcaggcaagccagctcccacacaagccagcctccacacaagcccggctcccacacaggcccgcttatgctggaaaccgcaacggcgcagccggttgcagcaacgccgccgggtcgcgataacgcgcgccgaaatggtcacttggcaaccgcgcctgcccggcgccgaacaagcgctcgcgcagggtttcgccgtcgttgtagcgctcgcgaaaacgcccgcgtcggcgcagttccggcaccaccagttcgatgaagtcgcgcgccgtttcaaaggacaggtactgccgcaggttgatcccgtcgatcccatcctcatccagccacttctcgatggcatccgccaccaccgtcggcgtgccggcgacgaaaaagcgctcgcgattgaagccgcccagttgcgccaataccgcgcctacggtggcgtcggttttgtagcggctcaggctctgccatcccttgacctcacggctgaccaggtcactgatcaaggtgtcatggggatacgccgtcaaatcaatcgccgattgcccgtgggccagggacgcttcaacactgaccagcttgcggtagctgtcgagcttggcgctgacctcttcgtcggtgcgcccgacgatcaccccggccatgacgataaatttcaggcccgccggatcacgctcatgctcaaccgccttgtgccgcatggcctggatattcgcacgcaccgccggcgcatcgttgccgccggtaaacaccacttcggcatggcgcccggcaaactcgatgccggccggtgaaccggtggcctggaacaacaccggcgtgcgctggcgcgatggctggcacaggtgcggcccggccaccttgaaatgctcgccgacgtggttgatgtagcgcaccttggccgggtcggtgtagatgcgccgctcgcggtcgacgatgaccgcgtcgtcgtcccaggagccttcccagagtttgtagagcacgtcgaggtattcgtcggcgatctcgtagcggtggtcatgcaccacttccgtgtcgtggccgaaattgcgcgcggcattcggcaggtaggaagtgacgatgttccagcccactcggcccttggtcaggtggtcgagggtgctcatgcggcgggcgaaagcaaacgggggttcataggtggtggaaaaggtcgcaccgaaaccgaggtttttcgtcacgccggccatggccggaatcaccagcaacgggtcattgctggggatctgcatgccttcgcgcagggacgtttcggggccgtcgcgaaagcggtcgtaggtgccaatcacgtcggccaggaacaccccgtcaaaggtgccgtattccaataattgcgccagctcggtccagtaatctaggtcgttgaagcggtgccggttgttgtccgggtgcacccacaaaccatggacgatgtgactgacgcagttcatctcaaacaaattcacgtgcagctgcttgggcaccgggaatactcctttcgtagaggcgtgtacaagacgtcagatcgcgacgttcaggtagaacgggactggcgtgtagtcggtttcaagggtcgggatcgcgtcgatcagcgcgcgggtataggcgtgtgccgggcgatcgaacaccgcgcgcaccgagccggactcgacgacttcaccggccttcatcaccagcacgcgctcgctgacgtggttgatcaccccgaggtcgtgggagatgaacaggcaggccagaccgaggcggcgtttgaggtcatcgagcagttcgagaatctgcgcctgtaccgacacatcgagtgccgacaccggctcatcgcagatcaggatctgcggctcgctcgccagcgcgcgggcaatcgcaatgcgctggcgctggccgccggagagttcgaggggccgacgcgacaatgcactggcatccaggcgaaccagcgccagcagttccagcgcgcgggcgcgccgggcatgacgcggcacgcccgccaccaccagcgcttcgaacagcacacgctgcacggtgtagcgcgggtcgaacgaactcagtgggtcctggaacaccacttgaacggcacgccgggcttcacgcttttgcctggcatccaggtcggaccagcgctggtccttgatccacacctcaccggcatcggcggtttccaggccgaggatcaagcgggtcaaggtggttttgccgcaacctgattcacccaccacaccgagcgtctcgccgcgccgcaactgcaacgacacctgcttgagcaccgtgcgcgttttaccgtcggggccgacaaaggacttggatagctcacgcgcttccaacagcacttcaccctgcggcgcgggctcgggctccacggccgcgagcagccggcgcgcgggctgaaagtgcacggccttggcggcgcgcagcagcaattgggtatagggatgtcgcgggtcttgcaggacctgttcggtgctgccctcctccacgatcacgccatggcgcatcaccgccacacggtcggccagccgcgagacgaccgacaggtcgtggctgaccatcagcaacgcattgtcttcaccgcgcaggctttccagcagcgcgatgacctgcgcctgcacggtggcgtcgagggcggtggtcggctcatcggcgatgatcagccgtgggttgcaggcaatcgccgaggcgatcagcgcgcgctggcgcaaaccgccagagagttgccacgggtattggcgggcacgcagttgcggttccggcacgccgacgtcgcgcaacagctccagcacccgcaggcggcgtgcctccagccccaaggcggtgtgcaggtgcaagggttcttcaatctcggcaccgacgcggcgcaacgggtccagcgcgcccaacgcatcctgcatcacaaagccgatgctcgcgccgcgcagttgctgccaggcgcgctccttgagcaggcgcaggtcgatgccctgaaaggccagcttggccgcctgaatctgcgcgcccttgccggtgaggccggccagggtgcgggcggtcacgcttttgccggagcccgactccccgacgagcgccaggcactcaccgcgatgcagctgcaagctgacgccgtgcagcactggctcggcctggccgaaacggaccgtcaggtcgcggatatcgaccagcgggccgagggtgtgaatgttcatcgtcataggggttttccttcgctgcgacgcagcagttcacggccgatggcgctgatggaaacaacggtcaaggtgatgatcagggcgggccaggccaccagccagggcgcgttggccaggaagctgcgcccgatggccagcatgctgccccactccggcgcggggggcggcgcgccaaaaccgaggaagctcaaggctgcgccggcggtgattgcgccgccgatgccgatggtggcgaggatcagcaccggcttgaaagcattcggcaagatatgccgcagcaccaccgccagctgtgactggccgagggtcacggcggattcgacgtaaccggcgttgcgcaccgtgagggtttgcgcccgcactagccgcgcataacgcggcacaccggcgatgccgacggccagaatcaggttggccgtgccctggccgaaaaacgtaatgatcaccagcgccagcaacaggtcgggaaatgacagcaacacatcgatgccgcgcatcagcgcgccgtccagccagcgcgggcccaggcctgcggtcaacccaagcaacgtgccccaggccaacgccagcgcggtcgccgccagccccatgaacagcgaggcgcgcacgccgtggatcagccggctgagcacatcgcggccattctcatcggtgcccagccagtgcacatgactcggcggccgaaacgcctggcgcgcggacgcttccagcgggtcgaagggcgcgaaccattggggaaccagcgccgccaacagcagcagcgcgacaaatacccctgccagcagcaaaccggggcgcagccgggcccacccgacaagacgcaacgggcggccagttgcaggccttgcgagcagcgtttcaatgctttgcgtcatgccaggctccttgtgctagggcgcaggattgggaatgcgctggtgaatggcctggacctgcgccttgatcgcggcgctgaggttcacgtccagcgcactgaggttgtcacgcaactgcgccaggctggtttgcccggtgagcgcgctggtcacgaacggcttgtcgatgacgaacgccagcgccagttgcgcgggtgtcaggccatgttcgcgggcgacctccacgtagccgctgatggcgtcctgcgccgaggcgctgtcatagcgattgaaggtgcggtacaccgacgacaaccgcgaaccctcggggcgggcgccgcccaggtacttgccggtcagtgcaccgaaggccagcggcgagtacgcgagcagcccaacaccttcgcggtgggtgaactccgagagcccgccctcgtacaggcggttaagcaagctgtaggggttttgcacgctggcaatgcgcggcaggccgaggcgctcgctctgtttgagaaattcggcgacgccccatggggtttcgttggagacgccgatgtggcgcactttgccggccttgacctgatcggcgagcaccgccagggtttcctcgatggccacgctttgggtgtcgtcctgatacgggtattcgcgctggccgaagatgttggtggtgcggtcgggccagtgcagttggtagaggtccaggtagtcggtgttcaggcgtttgaggctgccgtccagggcttcgacaatgttgcgtcgatcatggcggctgaggccgtcgcggatatgctgctggctattggggtcacgggccgggccggcaattttgctcgccaggatcacctcgtcgcgccggccgctggcggtcagccaactgccgatgtaacgctcggtggtgcgccaggtttcggctttggtcggtgtggggtacatctcggcggtgtcgatgaagttgatgccttcagccagggccaggtcgatctgctggtgggcatcggtttgcgtgttctgatggccccaggtcatggtgcccaggcccagcacgctgacctggatgtcggtgttgcccaattggcggtaacgcatgggtgatcctttttgattaaggggttgaaggctcataccgcactcgcttcgtcgcgggcggcctgctgttcggcgtcggcggcttgcaggctgcgccacgcggcattcggggtgacgtcgttgaggtagtaattgcccagggcgcgctcgcggaaaatcgccgggttatgggaggccagggtgcgggcgttacgccagtggcgatcgaagcggcgcgattcactggtggccgatgcgccccccacttcgaacaacaaggtggtggcttccagtacttgctccagcacgatctgctgcgcctgataggcgcgaatttcagcctcggtgtaatgcgcctccacggccgtgccgccctgctctgcctcgtgcacctcttgcagcacttgggcgacagccagcacttgcgtgcgcgcggcgtatgccaggctcgacaggcggccgatcacgcgctgcaccaaagggtcgtccttcgggctcgattgccccggcacgccaaacgcccgggtgcgccctttgacaaacgcggtggcgtcgcgcagcaccgcgttggcgatgccggccagggtggcgaggtggaacagttggtagaacgcgctcaggtaggactcggcgcgcagctcgtcttttttgaagcgccgcacgatgtgctgcgccgcgacgttcaccgccttgaagcgtgtggtgccgctgcccgtgaggcgttggccgaagccgtcccagtcgtcctcgaccgtgacgcccggagcgtcggtgcgcaccgcgaggctgacaaagtcttccccctccagggcaaccgccgcaatccagtccgcgtacagcgtgccggtgcagtagtacttctcgccatccagctgccagccggcgtccacggcgcgcagggtcaccgaattgcgcgtggtgtcggtgcgctcggccatcgccgcgccccacagctcaccgccgaccactttggcaaaccagtaagcctgggactcggggtcacggctggacagccggccttcgacgaaaccgaaatgcgcacgcacaatctgcggcaagttcgaatccgcctcgcccagctcgatcagcaagcgaaacaattgcggcaagctggcgcccaggccgccctgggcctgcggcacgcgcagggcaccaaagccggcttcgcgcagccagcgaaccgcgtcatgggccaactcgcgttgctgttcgcgggcaacggcggtagcggctatctgcgcaaaaacgccggcgaaacgctggtgcaaatcggggtagctcaccggcgcaggaatcgaagcactcatggtttttccttcttcagaggcactcacgcttgaacggcccgagggtcgatccagcggttgatcaaatcgacggccaggttgaccagcacataaacggtggcggccagcagcgtcacgcccagcactaccggcacgtctttgttgctggtggcgtcgagcatcaagcgcccgatgccctggcgggcaaacaacagttccacgaccaccgcgccgcccaacaggctggcgaacacaaagcccgcgagggtcaccaacggcaccagtgcatggcgcaaggcgtggcgcaggcgcacggcggtttcagacaggccgcgcgcacgagccatggcgataaagggttgttcgagtgtgtcttccagggactggcgcaacagctgggtcagcaccgccgcgaccggcaaggccagcgcgaccgagggcaggatcagcgagcgccagcccacggaaccggacggcggcaacaggtgccaatgaaaggaaaacaccagcaataacagcatgccgatcacaaacgacggcgccgaagacagcaccagttcgccgcccgaaacgattgaccgaacccgccgcgaacggttggcggtgaggatcgcgcacaccagcgccagcaccaccgccagcacggccgcgcttaacgacaactggagcgtggcgcccatctgctcggcaatcgcctgctgcaccgggatgcgcaaacggtaggactcccccaggttgccatgggccaggcgcaccaggtaatggccgtattgcacaatcagcggctggtccaggccgtactcggcgcgcacccgggccagcagttccggggtgggcattgcgtcaggcccgccgaggatcgccagcgcggtgtcgccgccactgaaattgaccgcgagaaacgtcaaggtggccgcgccccacagaacaccaattccagcgagcaggcgccaggcaatggctttgaacaggctcatggttgcccccggtccagccagatgctggtgaaaaacggcacgttgtgggaggtgtcgaagatcacgccccggacgtgacggttgtaggcggtgagcacctggctttccaccgagggcactgccggaacggtttcggtcaggcgctgttgtgcttcgccatacagcgcctgcaactcggcagggtcacgggaacggcgagcggcactgagcacacgatcgacttcagcgtcgcgaaagcgcccgacgttttggccgatcatcttgtcggtactgatggcctggctgtgatagagcacgaacagggcatcaggtgtattggtgtgccagtagccgccggccagtgcctggaattttccggcgtagcgtttctcggtgacacgggtcagcgggagcatttcgatgggcatctcgaagccgacttttttcaggtcagcctgaatggccaccgagacgctggcgggaaaggccgggttgtcgtaggacagcaaagtggccttcaggcgctggccgtctctggtgcggtagccctgggcatcacggccggtccagccggcgtcgtcgagcaaggcattggcggctttcacgtcgtaggccaaggcgtcgttgttgggctggtaaaaccgggtgttggccgcgaggaagtcagccttggcgaggtattcgccgaaaccggaaatccacgccagcccttcgcggtcgatggctttggccaccgcgcggcgcacgcgcacgtcatcaaacggcggctgctctacgttgaacgtcatgctgcggctcgggttgcccttgcgaatccggctgcgcatcaccagctcagggttggcacggatcgcggcggcattctgggccggggcatccagggtgaaatccgactggccggattccagtgcggtgaaacgaatcatggcctcgggcacatagctcagctcgatccggtccaggtaggcctcccccgtgtgccgcgtcaccgggggtgcccagtggtagccggggcgcttgataaatactgcgccctgatcgcgggtgtagctctgcaacaggaacgggccactgccgacggggtgctcggcgatggtcttgggcgcttcgcgaatctgtttgggcgagaccatccccagccaggactgtgccagtacgtcgagaaagggcgtgtagggttcgcgcaagtgggcttcgaaggtgtactcatcgataaccttgccgtccagatacggcgcgatataggccgccgccaacggggacttggtcgccgggtcgcgcatatgctccaggttggtctgcaacgcgcgggcgttgaagcgttcgccgtcgctgaaggtcacgtcgtcgcgcaggtgaaaggtgtaggttttgccgtcgtcggatatttcccaggaacgcgccagccacgggctgatagcaccctgctcgtcctgatacaccaggcaatcgaagagaatccggcccatccactggatattgccattggataacgcatgaatatcaaaactgccggcatcggtagcggccgacactcttaacgtgccgcccgggcgcccgggcgctgcttcatgaaaatcggtggcggcatacgacaccacgccattattgacactgccatccgccatggaagttgaacttcctggctcagcaggcggcgcacagccccccatcgacaggggcagtaacagccccacaaaaagtttcaggtagttggtcaacgtcgcttccctggaagaacttcatggacacttaaagttttcatcttgaagaggtaatgcagtgaacatgccactcttggagattgctcttccacggctataaaagacggcaaaaccccgcagggcaggcgcccaccatcaaaatacttatatgaatatgcccaatgtaatgccgctgattgttgatagccttacacactgcccgagcactgttgcctttgcgacagttgcaaaaaacctcacacaaacaatggctgttgagaatcaaacatcgcgccaaaacaaagtaccgcgccagacagccggactccattaaaagccgctgtttatggccaaacagccttggcataaaaactgctcaagggaaaacaggcatgactattcgaatagaaagctggggctcttttatctattcacaaggaacacgcttaatgaatcaacatgttcggggagcgcttcaccgtttgacacttgcggtacgccaggcaacctggctggggctcggttcggcgctggtattttccaccgccgcctacgccgatgacgacgcatcgccacggctcaagacggtgacggtagaggcacagaaagtgacggccgttgaggcggcgcagagccagttgtccgaggtgccggggggcaccagcgtggtggacagcgagcaggtggcaaaaggacgaaccgctaccttgcaggacaccctcgcctatcagccgggtgtgtttgtgcaatccaccggcggcaacgacgctgccaagatctcgattcgcggatcgggtgcgaacacctcgcccgggtactttcgcgaaggcatcaagttcctgttcgacggccttcccatcaccggcccgggcggtacgccctatgagttcctgaacggttccggggtgaactacaccgaaatcctgcggggcgcgaacgccttccagtacggtgcattgagcctgggtggcgcgatcaatttcgtcaaccagaccggctacaccgcaccgggtgtgcgcctgcgcgccgagaccggcagctacggctacaacaagcaaagcgcaagcgtgggtggcgtcgagggtaattttgattactacctcaatgccgacaactaccgcagtgatggctaccgcgactatagcctgtcgaaaagccagggcgtggtggccaacttcggctaccgcttcagcccgcagctggaaacccgggtgatgttgcgttaccgcgacgagttccacaacgacccaagcgccacgaccctggatgccgtcaagcatcactccgatcgcgccagtgcaaccgccgaaagcagcggcgccggcagccggcgccccggcagcgtttgggccggcagcaagaccacctacaccttcgatgacgacgccaccctgtcagtgggttttgtctactatcagtacgcccacaacaacagcccgaacagcccgagcaaccccagttattgggactggcatgacctgagcgccgtgatcaattacgaccgcagcgacacctggttcggccacgaaagccgctccagcgtggccttcacttccaccgaacacctcaagggcgaggtcaactccacgttcgccaacaagcagacccgcaagttcgttgactacggctcatcgtttgatcacgtgttttccctgggcaatgacctggaactggtcgacggcctgtggctgaccagcggcgtctcggccatcaacgtgcgccggcatgccaacgtcaaggaagccctggtcgccaacaccaccacctaccccagcgacgtgacctacaacaactggagcctggcgccacgggtgggcgtgcgctacgagttcacgccgcaactgcaggtgttcgccaacgtcagccgctccattgatccaccggcctcgtgggagtattccggctcggggccgaccgcgccctacgtgaggccattggttgagcaaaaggccaacacggtggaggtcggcatcaagggttcatcggggatcttcgacggcagcctggcgatttaccgttcgtgggtgcgtgacgaattgctcaacgtgcagatcattgcgccgacggccaccgccgctgcggtcacgggtgctttcaatgcgacgccgaccattcaccagggcatcgaggcgggtttgaacacgcgcctgtgggaaaacacctcgggcgagaagatcaccttgcgccaggtctatacctacaacgacttctattaccggcacgacccgaccttcggcgacaaccaactgccgggcatcccgaaacacatctaccagggtgagcttcagtaccaacatccgcagggcttttacaccggtgtgaacgtgcaatccgtatcgcgtactgccgtcgattacgccaacaccttctatgcgccctcctacacgatcttcggggccaatatcggctacgaaacaccgaagaaagactggaaggtgtcactggacttgaaaaacctgaccaacgagaagtatgtgaccgccgtgcagccgctctacaacgccgcaggccaggacacggcttcgctgtacccgggtgacggcatcggcgcttatgtgggggtggagtaccgctattaggcttgccaaatcgcggacaaaaaaagcccgctcaatgagcgggctttctgtggtgacctggcgttcagtgttccaggttaccgaatatggcgcagcggacgggactcgaacccgcgacccccggcgtgacaggccggtattctaaccgactgaactaccgctgcgcgtaacacatgaagcgaatggtgggtgatgacgggatcgaaccgccgacattctgcttgtaaggcagacgctctcccagctgagctaatcacccttcgtttcggtgtgggcggcatcatacaccaaaaatctgcaatgtcttgatttaaatgcactttatttgaaatattttgcatgaggccgccaatacccccgaaaacacgggtttatgtcggccaaacgcgaatctattgcgttcaccaggcgcttgcccgcacaattaaaaaccattctcaataacgcctgagccacgcctatgtctgtgggtgaaccgccatttcaacgggaaataaccctgctctacagcgagcatcatggctggctgctggcgtggctgcggcgcaagctgggttgtcgccagaacgcggccgacctggcgcaagacaccttcgcgcgccttctcaatgcgcgcgaatccgtggctgccattcgcgaaccacgggcgtatttgagcacgacggcccggcgcctgattatcgaccaggcccgacgcaggcacatagagcaggcctacctgcatgaactggcactgacgatggatgcactggagggcttccagtctcccgagcagatccacgccaccctcgaagcgcttgagcacatcgcgtttatcctcgaaggcatgcctgtgtattcgcgccaggcgtttgtgctgtattacctcgaggacatgacccaacagcaaatcgcccggcagctcaaactgtcggaacgtacggtgcgcaaatacctgatccaggctttgatgcattgcggccacagcatggatacttgacccggccatgcccgaacagatcgaagaacaagccgccgaatggatgctgcgcttgagcgaaggtgaattgagcgaagcccagcgccaggcattcgagagctggaaacagcaaggcccgcaatacgcctcagccgccgcgcgcatggaagcggtcatctcacggatgcaagcgctgcgtgggcacaaagccccggcgcgagccgcattgggcgcggcattcgctcatcagcacgcgcgacgccgcaaaaacactgtgcgcgccctgctgctcgccgccagcctcgcgattccggcggcagcggtggttgtcagcccgtatccgcaacggtggatggcggatgtgcgcaatggccccggccagtggcaaaccctgcacttggccgacggctccaccctgagcctgaatggcatcagtgcagcgaacctgcatttcgacggcgaacaacggcgcatcgaattgctgcaaggcgagatcctggtcgacgtggcccacgatcccgcacggccatttatcgtgcagaccgctcaaggcaccttgcgggcattgggcacgcgatttgtcgtcaagcgcgagggcgatgtcacggtgctgagcatgctgcagtcacgcgtcgccgcgcacagcacccgtggccggcagacactggaggtcgatgccggcgcccgggccttgatgagtgctgacaacgtgcaactgacgggcaccgtcgatccgtcgagcatcaacgatgcctggcgccgccatcagttggtggtggaaaaccggcccctgcccgaaatcctggatgaaatcgggcgacatcgctccggtcgcctacagttcgatcgtgccgcactgcaaggcctgcgcgtgtcagcggtgattcctctggacgacagcgaccacgccttgcaattgctcgctcaaaccttgccgatcacgctgcgcagcttcacgccgtggctgatggtcgtgagcccggcaggcatcgccaataaataattattcgcattagcttccggtttttttgaggctgcccgtcaagagtggtaattcgacacctaaaggattgccttcaaccatgcacaccccttcctactcccgcgggcgctttagcctgctgaaaggcgcgccattgtccctggccatcttcaccgccacggcgttgagcagccttgtggcccaagcggacacgaccactaccgccgcccaggtttatgacattccagccggaccgttgggcgcctcgcttaaccggtttgcccaacaggcgggcgtggcgattgtgttccaggcccaggaactgcaaggcctcaatggccccggcctgaagggtcactacgcgatacaggacggctttgaccgcttgctgcaaggcagcggttatcgcgcggtgaaaggcgatcaggtctacgccttgcaacccgccccggttgccggcgacggccccatggagttgaaccccaccgaggtcaccgccaaccagttgggcaacgtcaccgaaggcaccggctcctacacgccaggcactattgcgacgtccactcgacttattttgaccccaaagcaaacaccccagtcggtcaccgttgtgacccgccagcacatggatgatttcggcctgaacaatgtcgacgatgtgatgcgccatacacctggcatcaccgtgtcggccttcgacaccgagcgcagcaactattacgcccggggcttctccatcaataactttcagtacgacggtattccttccaccgcgcgcaacgtcgcctactcggcaggcaacacgctgagcgacatggcgatctacgaccgtgtggaggtactcaaaggcgccaccggcctgctgaccggcgccggttcgctgggcgcgacaatcaacctggtgcgcaaaaaacctaccgcagatttccagggccatgccagcctgggtgccggctcctgggacaattaccgcagcgagctcgacgtgagcggcccaatgaccgaaaacggcaatgtgcgtggccgggcggtcgccgcctaccaggacaagcaatcgttcatggaccactactcgcgcaagagcccgacctactacggcatcgtcgaattcgacctgtcgcccgacaccctgctgaccgtcggcggcgactaccaggacagcctgcccaaaggctcctcctggtccggcagcttcccgctgatcaatgccaacggcgatcgcaacagcgtaaaacgctcgttcaacaacgccgccacctggagcagttgggagcaatacacccgcaccgtgttcgccatgctcgaacacgacctgggcaatggctgggtgaccaagctgcaactggaccacaagatcaacggttaccatgcgctgatgggctcgattcagggcgacgagccgcgcgccgacggcacagcgaatatcacgtcgggcaaatacaccggcgacacggtcagcgactcggcagacctgtatgctagcgggcccttcagcctcggtggtcgcgagcatgaactggtactgggcggctcgatcagcgcgtccgaatggaaaggcaaaggttactggaacctggcgcccaacatggtcgacttcaacaactggcacggccacgccacgatgccggactggggccaggcgcaatcgcggatcgacgacaccgtacgccagacgggcgtatacatgaccacccgcctgaacctggccgatgacctcaagctgctgctcggcgggcgcgtggtcaattatcaggtcaccggctacaaccccaactaccgtgagtccgggcggttcgtgccttacgtcggtgcgatctacgacctcaacgagacctactcggtctatgccagctacaccgacatcttcatgccgcaggaaagctacaaccgcgaccgcaacaacaaactgcttgagcccgacgaaggccagaactacgagctgggcctgaaagccgacttcttcgacggccgcctgaacgccagcgccgcgtattttgaaatccacgaaaccaaccgctcgctgtccgacgacgagtacaacaaccagaagccgaccccgagtaactatgcgttcaagggcaccaaggcggtgaccaagggctacgagctggaagtctccggcgagctggcgcccgggtggcaattgcaggccggctacacccacaagatcgtgcgcgacgacaaagacgagaagatttccacgttcgaaccggaagaccaggtcagcctgtacaccacctacaaactcaagggcgacctggacaagctgacggttggcggcggcgtgcgctggcagagtgtgggctggcaggacatctacaacacaccgcacaaaggttatgaagagttttcccaggacgcgtactggctggtagacctgatgacccgctaccagatcaccaagaacgtgtcggcaacgctgaacatcaacaatatcttcgacaagtcctactacaccaatatcggcttctataactccgccgcttatggcgaaccgcgcaacgtcatggtgagcacgcgctgggatttctgacccgccaataaaaaacgccgccgatcatcggaaatgatcggcggcgtttttgatatcgacgggcttttgcgacccccggacagcaaaaagcccgctcaatgagcgggctttccgtggtgacctggcgttcagtgttccaggttaccgaatatggcgcagcggacgggactcgaacccgcgacccccggcgtgacaggccggtattctaaccgactgaactaccgctgcgcgtaacacatgaagcgaatggtgggtgatgacgggatcgaaccgccgacattctgcttgtaaggcagacgctctcccagctgagctaatcacccttcgtttcggtgtggcgcgcattctacggagcgaccttaagtctggcaagcactttcttaaatcttttttttgaggccttccaatggcttaggcagggttggcctcagcccggatcaagagaataatgcccccctttgtataaaggagagactcaccccatgtggttcaagaacctgcttatctatcgcctgacccaagatctgcctgttgatgccgaggcgttggaagcggccatggccaccaagctggcgcgcccttgtgcaagccaggagttgaccacttacggtttcgtcgccccttttggtaaaggtgaagacgctcccctggttcacgtcagcggtgacttcctgctgatcgccgcgcgcaaggaagaacgcatcctgccgggtagcgtggtgcgtgacgcactgaaagagaaagtcgaagaaatcgaggccgagcagatgcgcaaggtctataagaaggaacgcgaccagatcaaggatgaaatcatccaggccttcctgccgcgcgcctttatccgtcgctcgtcgaccttcgccgccatcgcgccgaaacagggcctgatcctggtcaactcggccagcccgaagcgcgccgaagacttgctgtcgaccctgcgtgaagtgatcggcaccttgccggttcgcccactgaccgtaaaaaccgcgccaaccgcaatcatgaccgactgggtgaccacccagaaaccggccgacgacttcttcgtcctcgacgaatgcgagctgcgcgacacccacgaagacggcggcatcgtgcgctgcaagcgccaggacctgaccggcgaagaaatccagctgcacctgaccaccggcaaagtcgtgacccaattgtcgctggcctggcaggacaagctgtcgttcatgctcgacgacaagatgaccgtcaagcgcctgaagttcgaagacctgctgcaggatcaggccgaacaggacggtggtgatgaagcgctgggccaactggacgccagctttaccctgatgatgctgacgttcggcgagttcctgccggcgctggttgaagcactcggcggtgaagaaaccccgcagggcatctaagcccacacggtcagtgtgggagctggcttgtgtgggagccgggcttgcccgcgatgcaggcaccgcggtcttcaatcagaccgagtcgatgctatcgcaggcaagccagctcccacacaagctagctcccgcagttgatccggttgcaaccccaagcattctaataacaaggacatcccatgcgcgcactcgccgccctgagccgcttcgtcggcaataccttcgcctactgggtgttgatctttgccgtgctggcgttcctcgaaccgggctggttcatcggcctcaaaggcgccatcgtgccgctgctgggcctggtgatgttcggcatggggctgaccctcaaacttgaagacttcgccgaggtcgctcgccatccgtggcgcgtggcactgggcgtggttgcgcatttcgtgatcatgccgggcgtggcctggttgctgtgccaggccttccacctgccgccggaaattgccgtcggcgtgatcctggtcggttgttgcccgagcggcacttcatccaacgtgatgacctggctggcccggggcgacctggcgttgtcggtggccatcgccgccgtcaccaccctcctcgccccgctgctgacgcccgcgctgatctggctgctggcctcggcctggctgccggtatcgttcatggaattgttctggtcaatcctgcaggtggtactgctgcctatcgtgctcggcgttatcgcccaacgcgtgttgggcgaacgcgttcgccatgcggtggaggtgctgccgctggtgtcggtggtgagcatcgtgatcatcgtcgccgcagtggtagcggcgagccaggcgaagattgccgagtcgggcctgttgatcatggccgtggtgatgctgcacaacagtttcggttacttgctgggctacttcaccggccggctgttcaaattgccgctggcgcaacgcaagtcgctggcgctggaggtgggcatgcagaactccgggctgggcgccgccttggccagcgcgcacttctcgcctctggcggcagtgccgagtgcgctgttcagcgtctggcacaatatttccggggctttgctgtcgacctacttccgccgcatgagcgaaaaggaagaccgccgcaccttggaaaacacgccgcaaacttgatcgtccgatcaatattcggcactctaccggacttcgcggggacgaccccgcgacgctctcaagcgcctaatccggggacgaccccacgtctattttatagagagggtcagcatgtcctggatcgttctgttttttgccgggttgtttgaagtcggctgggccgtcggcctgaagtacaccgacggtttcagcaagcctttgcccaccgccctgacgattgccgccatggccatcagcctcggcctgctcgggctggccatgaaggaactgccgctgggcaccgcctatgcaatctggaccggtgtgggcgccgtgggcacggtgattgcggggattatcctgtttggggagtccatggcgctgttccggttggcgagtgtggcgttgatcatatgcgggctggttggcctcaagataagcgcttaggccactaccgctatcgcaggcaagccagctcccacattgaactgtgaacacagtccaaatgtgggagctggcttgcctgcgatgaggccctcaggccttaccttttactcccgcgcaacacacctaccacctcctgcaaccgcgccggcgtcggcccctcgaccggctcacccgccaccagcaccacccgcgaccagatccgatgaaaaacccctttgttcggatcgcggctgaagaaactcccccacaacccctgcaacgccagcggaatcaccggcaccggcgtttcctccagaatgcgcgtcacgccaccgcgaaactcattcatctcaccatcagccgtcagcttgccctcggggaagatgcacaccaactcgccgtccttcaggtactgcgcaatccgcgtgaaggccttttcgtaaatctggatatcctcgttgcgcccggcaatcggaatcgcccccgctgtacggaagatgaaattgagcaccggcaaacggtagatcttgtagtacatgacaaagcgaatcggcctgcgtaccgcgccaccgatcaacagcgcgtcgacaaaggaaacgtggttgcacaccagcaacgccgcgccttcatccggaattgcttccaggttgcgatgctccacccggtacatggaatggctgagcagccagatcatgaaacgcatggtgaattcggggacgatcctgaagatgtaggtgttgaccgcgatgttgagcagcgacaccaccaggaacaactcggggatcgacagcttggccacgcttaacagcaagatcgacacgatggccgagaccaccatgaacaacgcgttgagaatgttgttggccgcgatcacccgcgcccgctcgttctcggcggtgcgcgactggatcaacgcgtacagcggcacgatatagaagccgccgaacacgcccaggccaagaatgtcgaacagcacccaccaggccttgccgtagctgagcacggccagccagtcgttggcttgcacgttctgcgggaagccaccggagtgccaccacagcagcaggccaaacacggtcaggccaaaggagccaaacggcaccaggccgatttccaccttacgcccggacagcttttcacagagcatcgagcccagcgcgatgcctaccgagaacaccgtgagaatcagcgttaccacggtttcgtcgccgtacaaccattccttggcgtaggccggaatctgcgtcaggtaaatcgccccgacaaaccagaaccatgagttaccgacgatggaacgcgaaaccgccggcgtctgccccaggcccaggcgcaaggtggcccaggattcactgaagatattccagttcaggcgcaaccccggcgtggacgccgccgcccgcggaatgctgcggctggccagataacccagcaccgccacaccgacaatcgcacccgctacaaccggtgcgtaatgggtggacgacatcatgatcccggcgccaatggtaccggccagaatcgccagaaacgtgcccatttccaccaggccgttgccgcccaccaactcatcttcgtgtagagcttgcggcatgatcgagtacttcaccggcccgaacagcgccgagtgggtacccatggcgaacagcgccagcagcatcagctccaggtggttggtgaggaaccccgtggcccccacggccatgatcacgatctcgccgatcttgatcgcgcggatcagcgcatccttgttgaacttctcgccaaactgcccggccagcgccgagaacaggaagaacggcaggataaacaacagcgcacagaggttgacccaaatagagcggtcaccgtcgatggtgagtttgtagagaattgccaggatcagcgattgcttgaagatgttgtcgttgaaggcgcccagcaactgggtaatgaaaaacggcaggaaacgccgtgtgcgcagcaaggtgaattgtgaggggtggctcatcgtccgtgttcctgcgtggcctgaaggcttttgtgttttttcaggccacgactttacctaatcccgcttacttattcgctagtcccgcaatgcatggcgaaacaaaaagctcacctttataggcaccttgcacggtgcgcttggccacgatcagccacatcaacgccaacgccaccaccagcacgctgcccaaaacactgaaaaaccccaggtgcagcaggctcgccagcttcagcgtggccaacgcgtacacacccaacgggaaggtgaaaccccaccagccgaggttgaacgggataccggcgcgcaggtagcgcagggtgatcagcaccgcgatcaacatccaccacaaaccaaagccccacagcgtgatgcccgccaccaagccgaggccgttggccatttcacccacaccgggcaggccattggcggcgaagatcgccggcgcgtcgccgcccagcaacaacatccccaaggcgccggtgccgatagggccaagggccagccagctcgaggcggccatattggcgtggggcagtttatgcagggccatgcgcagcatcaaaatggtcaggatgctgaacgccaccggcagggaaaacgcccacagcacgtaactggtcaccagcataaccagttgcgaatgcgcgtccgccaagtgcggcgccagcaggccaccgctggcggccgcgacttcagcggcgactaccggcaacagccacacggcggtcatctggtcgatgctgtgttcctggcgcgtgaacatcatgaacgggatcaacacgccgcaggccagggccatcgccacgtccagccaccacaaggcttcgcccagcagcaccacaccactgccccagcgcggcaggccgaacaacagcaagccgttgagaatggtcgccaggcccatggggatggtgccaaagaacatcgaaaccgtggagtgcccgaagatccgccgtgcctcgtggaagaacatcacccagcgcgcggcatacagcacgctgaacagcacaaacaggccaatagtgaaaaaccacagcccttcggcgacggcgtgcaggccgggcagattgaccggcagttgggccagtgccaacgccatcacgccggtgcccatggtggcggcgaaccagttgggggtgaactggcggatcacttcccgtggacgggtcaggtgactgaagggtttgtagcggatggtattcgagcaggtcatgatggcaatcctcttcctcgcatgaggttgagaccatggtagaactctatcgaatatctatataacgggtaatatctctatctgttatctactttaccaatattaacgccggctaaaccgttgccttggctcgcgccgctccctgcgtcagcaagcctgccagcgcgccgaccgctaacaaaatgagcactgcgccataaccatcggtggtggcgatcaggccaaacactcggctcaggttacccgccagcagggccggtacgcagaacgccatatagctcagcacatagaacgccgacatcaacccggcccgttcatggggcaacgccaagccgacgatactgcgcacactgcccatgaacccgccaccgaagccaaaacctgcaaccacactggcggcaaagaacagccacaggctggcgctctgcaccgcgaccagcaacaccgccacgcccacggccagcagggccgccgaaaggcgcatgactttgtctgccgggtgattacgcaggctgtagatcatcaccgcaccactcaaggtcacgactgcaaccaggccgccgccgatcaaatgcgaggtcgagccggtcgcagcccgcaccagcgacggcgccagggacgaaaagaacccgcccagcgcccacaccgccacattcagcggcatcgccagccacaaggcccggcgcgcctgcgcgggtacatgcagggtgggcgccagcgacttcaaggcacctggtatacggctgacggtttcaggcaagcgccacacataaagcgcctgcagcaccatcaggcccagcagcgtgaagtagatcaattgggtcgggcgtggcgcgtattccaccagcaagccactgcccaaggcgccgcaagccatgcccaacagcggcgcgaggctattgagcatcggcccgcgcaggcggtcggtgtccagcagcgtcgccgccagcaccgcggtagccgtgcctgtggcgaaaccttgcagcgcccgggcggcaatcaggtagccagtgctgtcagcattgataaacagcaacatcgccacactattgagcagcagcgcgacgaaaatcaccggcttgcgccccacgtggtctgacagcgaaccgacagtcagcagcgcggccagcaagcacacggcatacacgccgaagatcaccgtcagcatggctgcggagaaatgcaggctgtcctgatagacctgatacaacggcgtcggcgcgctggatgcagccaggaaggtcaacatcgtgatgaccaggaacgccaggctggaacgttgagaaatgacgctaggcatgtgcacactccgctaaagctaatattttgcttttgcagagtgtgctactcataagcgcttaaagcaaattctttgtgttaaggttttatccatggcgattaaagaaggccttcgcccggggggccgcagtgcccgggttcaagaatcagtgcataacgccgcgcgcgaattgctggaagcccacgagcgttccagcgtcaccgtgccgatgattgctgcgcgtgcgggcgtcacgccctcgactatctaccgccgctggggcgacttgtctgcgctgctcgccgatgtggcgctggaacgcctgcgcccggaaagcgagcctgccgacaccggcagcctgcgcggcgacttgcgcgcgtggggcgagcaatacctggacgaaatgagttcggagcttgggcgcaacatgatgcgcgacgtgcagtgcagccgccccagggactattgcagccagatcctgatgggccagttgcagattattctcgaccgttaccaaagcagcgttgatgtgcgaccgactgtggacaggttgttgaatctgattgctgcgcccacggtgtatcgcagtctgttttcgagtgagcaactgccggtagaggagttgcacgcattgatcgagctggcgctgaaaacctgagcagaaaggttaaggaccagacaccgataaacaggtgggagctggcttgccagctcccacattgccctgcgtatattcaataaaaaacggcctcacagggaggccgttttttatggcgcagctgcgcttaagtacgcatcccgcgcccactcaccaacaaccgtgcgcaaccgatgtagagcacgacggtggccaccagcatgaaggtgatcgccacgctgatcttgatatccgaaacgcccagaatgccgtaacggaaggcgttgaccatgtgcagcaccgggttggccagcgacacggtctgccagaatggcggcagcaaggtgatggaatagaacaccccgcccaggtaggtcagcggcgtcagcacgaaggtcgggatgatcgagatgtcatcgaagttgcgtgcgaaaacggcgttgatgaaccccaacagcgaaaagatcgtcgccgtcagtaccaccaccagaatagtgaccccgaggtgatgcacctgcaggtgggtgaagaacagcgacagcagggtcacgatcacaccgaccatcaagccgcgcagcacaccgcccagggtgtagccgatcagaatggtatggggcgacaccggcgacaccatcagttcctcgatggaacgctggaacttgctgccgaagaaactggaaaccacgttgccgtaggagttggtgatcaccgacatcatgatcaggcccggcacgatgtactccatgtaggtgaagccgcccatgtcaccgatctgccggccgatcaggttaccgaagatcacgaagtacaagaccatggtgatcgccggcggcagcagggtctgcggccagatccgggtaaagcgcttcacttcccgatagacgatggtttgcagtgcgacgaggttgggttgcagttcggaactcataccgccaccttcgccagatttttctccaccagggacacgaacaactcctcaaggcgattggttttgttacgcaggctcagcacttcaatgttctgggccgccagttgagtgaacagcgcggtgatgcccatggctttgtccacctgcacttccagcgtgtggctgtccaccaggcggcttgggtagccgagcaattgcggcggcgccgacaggttgtttttcaggtcaagcaggaaggtttccacatgcagctggcccagcaggttacgcatgctggtgttctcgacgatggtgccgtggtcgatgatgccgatgttgcggcacagctgctcagcctcttccaggtagtgggtagtgaggatgatggtgatgcccttctcgttcagctcggtgaggaaggtccacatcgagcgacgcagttcgatatccacacccgccgtcggctcatcgagaatcagcaggcgtggctcgtggaccagcgcgcgggcgatcatcaaacggcgtttcatgccgcctgacagcgagcgcgaaggcacgtcacgcttgtcccacagccccagctgggtcaggtattgctcggcgcgctccttggcgactttcgccggaatgccgtagtaaccggcctgggtcacgacgatgtcgaacgtcttttcaaactggttgaagttgaattcctggggcaccacgccgatggaacgcttgagtgccgccggggatttgtccaggtcatgaccaaagatattcactgaaccggtggtcttgttgaccagggtcgagaggatgccgatggtggtggatttgccggcaccgttggggccgagcaaggcgaagaagtcaccttcggccacgtccagatcgataccactcagggcctggaaaccgttgccgtaggttttggttagctgccggatggacagagcggaactcatatcggaatacgcaccaaagaagggaatagaaagagtagatgacggcgcagcccacgtagttcaacggcggcgcatgacaggcatggtgcttgcccgcgccgcacaagtacagtcacccgtattaatagtgggtattaagtcaacgcggtcatcacggctttgcggtacgccgggcgctgctgcagacgctggtaccacgcctccagatgaggcatcgaagggcgttcgataggcatttcaaaccaggcataaataaagcagcccagtgggatatcgcccataccgaactcgctgcccgacaggtagggctgatcggcgagcgccttgtccaccgtgccgagggcgtcgatgcaggcctggcgcccggcgttgatgctgtcccagttttgcttttcaggaggggtgcgcaggatgccccagaacactgccttgaaaggttcggcgagggtcgaggtggtccagtccatccacttttccgcattggcgcgggcttgcatgtcggcggggtaaaaactcgacgtctgcttggcgcaaaggtagcgcacgatggtgttggattcccacagcacaaagtcgccgtcttcgatcatcggcacccggccattggggttcaaagccctgtattgcggggtgtcgaccacaccaaaagccccgcccgcatcaattgcttcatagtccaggccgagttcctcggcgcaccacagtgccttcctgacgtttgacgaatttttacgaccccagattttcagcatgaccgcgccttattgttgatgaacatggcttgatgaacgcagcagcatacgccggttcacgtgcggcttaaatcactctgcatgtcgcccagcaacgccggcatgtcctcggcgaacaagtgcgggtaacacgcctgaatatgggcgaagaaaaacgcctcgggcacgtcgggaaattgcccgtggtccacgacgtactccatcgagcgctgaccctggcggttgaacgcgtgaaatacgctgtcattgatcccgtcgaacgcaagcggcggcacatcgaacacgtcgcacagctggctgttgaacgctggcgtggccttgacccaacgcccgcgcaggtacagctcggtgtagccgtgcatggcgaacacatcgcttttcagcagcgcgatcagccggggcgtcgacaggtgattgcgcacatccgccaggccgatgcgcgccgcaatcccgcaatggcgggcgcaggcggccagcaaggtggccttgggcacacagtagctctcgccggtcgcgagcgcgaagctggccttgagcgtgcctggatcacggctgaaggtgtaggggttatagcgaatcgcctcacgcaccgcgtagtaaagactgactgcctggtcacgtaaatccgcgctggagccgcgatgtttttccgcgaactccaccaccgcagggtggtcactatcgatgaagcggctgggactcaggtacgtatccatgagctttatctccaagacaagccttgagtgtaacgacaggcctgccagggagataacgacgattcggccaaatctcgttacaccctgatcaccgcgctttttcggatgccgactaagctccatggtggtttcgcccctggtttcacggaggattgaatatgctgttgttgtggatactggtgctggtggtcggcattgcctacctcgcacaccgccgcgtcgcccccctgcccgccctgggcgtggtcgccgtttacctgctggcgatgggcgcctggagccacgcaccgggttggctgctgctgatcttctgggtgttgatcgcccttgtggcggcccccttgctgttgcccgacctgcgccgccaatacttcaccaaaccgctgttcagctggtttcagaaagtcctcccgccgatgtccgaaaccgagcgtgatgccatcgacgccggcaccgtgtggtgggacggtgagctgttcagcggccgccccgactgggacaaattgctggcctaccccaaggcgcaattgaccgaagaagagcaggcgtttatcgacggccccaccgaagaactctgcgccatggtcagcgactgggaaatcggccaggccatggacctgccccccgccgcctgggagcacatcaagactcacggcttctttgcgttgatcattcccaaggaatatggcggcaaaggtttctccgcctatgcccactcccaagtggccatgaaactcgccacccgcagcggtgacctggcctccacggtgatggtgcccaactccctcggcccggccgagctgctgctgcattacggcaccgacgaacaacgtaaccactacctgccgcgcctggcccgtggcgatgatattccgtgcttcgccctgaccggcccgctggcaggctccgacgccggcgccatgcccgacaccggcgtgatctgcaaaggcgaatgggaaggagaggaaaccctcggcctgcgcctgaactgggaaaaacgctatatcaccctcggtccggtcgcgaccttgctcggcctggccttcaaagcccatgacccggaccatctgctgggcgaagaagaagacctgggcatcagccttgcgctgatcccgaccgacacccccggcgtggaaatcggccgccgccacctgccgctgggcgccgcgttcatgaacggccccaactccggcaaagacgtgttcatccccctgaaattcctcatcggcggccaggagatgctgggcaagggctggatgatgttgatgaactgcctgtcggtgggccgttcaatctctctgcctgccgtgggcaccggcgcggccaagttcaccagcctggtcaccggccaatacgctcaggtgcgcgaacagttcaacgtgccgctgtcagccttcgaaggcatccaggaagccctggcccgcatcggcggcaatgcctggctgatggacagcgcgcgcatgctcaccgccaacgcggtggacttgggggaaaaaccctcggtgctgtcggccattctcaagtaccacctcacagagcgtggccgcgagtgcatcagccacgccatggacgtgcacggcggcaagggcatcatcatgggcccgaacaactacctgggccgcaactggcaaggggcgccgatcttcatcactgtcgaaggcgcgaatatcctgtcgcgcaacctgatgatcttcggccagggtgccatccgctgccatcccttcgtgctcaaggaaatggcgttggccggtcgcgaagaccatgaccaggcactgaaagagttcgatggtttgctgatgcaacacatcggtttcgccgtgagcaacgccgccagcaccctggtgctgaacctcggcgttggccacttcgagaaggcgccaggcaaccgcctgagccaaggctacttccgtgcgctgaaccgtcaagccgctgcgttcgccctgctggccgacctgagcatgatgctgctggggggcgagttgaaacgtcgcgaacgcctgtcggcgcgcctcggcgatgtgctgagccacatgtatctggcctcggcggcgctcaagcgctaccacgacctggattcgcccgaccacctggagccgttgttcgcctgggccatggaagaaagccttggcgaatcggaacgcgcgctggatgagttgctgagcaactttccgaacaagatcctcggctgcttgctgcgggtgatcgtgttcccgttcgggcgtcggcataccgggccgtccgatgcgctggatgctgaagtcgctgccgtgatcggccgcgccaagggcgacccgaccctcgaagaactgctggcgggctgctaccgcccgcaatcggcggaagatccggtgggcgccctgcaacatgcctatgacctgcttggcgccagccacccgctgcagaaaaaactgcacagtgcgctgaaaagcggccaggtcaaaccgactgccggcgagcatgccatcgacgcggcattgcacgcgggcgtgctgcaaccagccgaagcgcaaactctgcgtgacgccgaggcagcgcgacgcaaggtgatcgacgtggatgatttcagcaaggaagaactgacccaggctgagggcaaagtccgctgagtcgagcggtcatataaaaacgggcgcgagaggcatatactctcgcgcccgtttttgctttagaggacttatctcgtgtccaacgtcgttgccgatcatctcgtcttgctcgaccacctgcgcagcatcctggttgccgtcggcgaagccgaacaggtgcccgaggaaagccacaccctgttcctggaacgtttcgacgaattgcgcgccctgctgccgatcgacccgatcgaaagccagtacctgggccaggacctgatgagccaggtcatcctgcgctacccgcaaattgcccacctggtcccgcgcgacctgctgtggttctttggcggcgactgcctgcacttcatgcccgacgaagaactggacctgtaccaggccctggaagagcggcgttttgaagctgaacagaacgacgaaccgttcgactggaaccaggaaaaacagctgctggccatgccgcaggaccagagcaagcactgattttcagacccgcgcaaaaccaaatgtgggagctggcttgcctgcgatgcgggcaactcggtctgtcagccaaaccgaggtgatgccatcgcaggcaagccagctcccacattgcaccacattccaaccctaccgtcggcgcaatgtcggctctttggccatgcactccaccagataatcaataaacacccgcaacttgggcggcaagtaccgcgtcggcgagtgcagcaaccacgcctcgccagtgtaagacgcaataaaatcccacgccggcaacacctgcaccaactgccccgtctccaaggcatggcgcgcggtgaagtacggcaggctgccaatccccacatgttgcagcaccgcatccagccgcacgcccgtgtggttcgccgcataccgcccgcgcacgcccaccgttacggccttggcgccctggcggaatttccagcgtgaatcccccggggtttctccgagataaatgcaactgtgctccagcaaatcatgggggtggccgggtgtgccatgctcggccaggtagtgcggcgtcgcgcacagcaaatgctcgatgggcaataattgacggccaaccaaccccggtggcgggctatcggtgatgcggatactcagatcgacattgtcatcgattaaatccacatgccggtcctcaaggatcaattgcacgtcaaccttcggatagcgccgcaagaattcgggcatatgggggtgcaccacaaaccgtcccacagccttgggcacactgacccgcaccaaaccctcggcctcatgcgtgaactggccactgatttccatcaccgaacgcgccgcgttgaccatctcctggcaacgcttgaacacctcttcaccgccttcgctcaaccgcaacttgcgtgtggtgcgttgcagcaagcgcgtggccaaggctttttccaggcgtgaaatgctgcggctaaccgccgaaggcgaaacgttcagttgccgcgcggcctcggagaagttaccggtttccaccactttgacgaaaaccgccatttcacccaacagcggcaaaggaagattgatgctcatgacgcacaggtccattgatatttgaacggattatcaccaatctacgcactatttatactgcccgcagaaccctgatgcggatgtaaatgatgaccgagcgcctgtttttcacccacgaccacctgaccgccgagcttgaagtgctggcctgcacgccgcacgaaggtcagtttgcggtcacccttcaatcaacaattttccatccccagggcggcggccagccttttgacaccggctggctcggcgacagcaaagtcatccgcgttattcaggaagccgaccgggtggtgcactacgtggatcagcccgtggcgcccggcccgatcattgcgcgggtcgatgagcaacgccgcgccctgcacacgcgcctgcattccgcggggcatttgatcggcaatgccggggaagccttgggctggatgccgatcaaggcccatcactggccgggcgaaggcaaggtcactttcattcgtggggaggccgcccgaagcatggatgccgaggtgattcagcagcagatcaaccagtggatcgccgctggctatccacggcatatgaacctggaagacggcaaacgggaagtcggctttggcgagttgcccgcctatgcatgtggtggcactcatgtgcaggcgttgagcgagttgggccaggtgacaattctggccctgtcggagaaaaagggcgcgctgtcggtgcgctatgaagtcgactgacagcgcgcactcgctgttgtgcctacaggaacgctgaagccgaactcggccgaatgtgggagctggcttgcctgcgatggcatcaaccgggtgtgtctgatgtaccgaggtgccagcatcgcagcggtgcgacgattcgacaagccagctcccacagaaaagcgcagaaacctataccgctatcgcccccgcccgccccgcctccaccacaaacgacttgagcgtggacaccgtggccaatggatcacgcggatccgtaatcacgcgaaaatccgtcagcatcttctgttcagtcaacgccaccgatacatacccgcgctggcgactgtcaaaaaacttcacatgaggattgagcggcaacagctgcgagaaggcgtcaaaaggcgggccgtccgaggtgaccgacgagccgacaaactcagtggcgaccaccggcgagttcaagttattggcgtcggcatgcaaatccgtggtccagaacgaatggatatcaccgccccagaacaccgggtttttcacctgcctgcgcgcaatggaggccagcatccgctcacggttggccatgtagccatcccaaccatcggtccaacgcccgggctcctgagtgaccgggtcacgctgggtcagcggcgctaccagcaggtcctgggcgatcacgttccactgtgccggcgactcggcaaaaccacggtccagccaggcttcctgctcccagccgagcatggtgcggcgcgggtcgcgcaagtcggtgcaggtgttgtcggcgatatgcccctgatggctgccattggccgcaatgcacggctgctcggaacggtattggcgcccgtccagcacatggaagcgcgccagtcggccgtagtccagccgccggtaaatacgcatgtccggccccttcggcaggctgctggcgcgcagcggcatgtgctcgtaaaacgcctgataggccgccgcccgttgcttgagaaattgcgccaccgtgatcttcgggtcttgggaccagcggttggcgtagtcattctgcacttcgtggtcatcccaggtcgccacactgggcgcggcggcatgcagcgcctgcaaatccgggtcggttttatacagtgcgtaacggttgcggtaatcgcgcaggctcaccgcattgccgctgccgtggggccggatgatcttgcccgaatccagcgcgtaggaactgtcgtagatatagtcgccgaggaagaacaccagatcgggctgctccgccgccagatgacgataggcgctgaagtaaccgcgttcccagtgggagcaggacacaaaccccaaccgcgccgaggccatggcctgcaagggcggcgtggtacgtgcctgccccaccgggctttgcgcgcccaagccttcaaactgataccaatacggcctgcccgcctccagccccgcgacctccacatgcaccgaatgggcgaaacgctcgctcgccacggcctcgccctggcgcacaatgcgcgtcatcgccgcatcgctggcgactcgccaacgcaccggcaccgcctggcgcaacccgccacggccgtctgcggcgttgaacaagggggccaggcgcgtccagatcacaaagccgtcgggcaacgggtcgcccgacgccacgcccaaggtgaaggggtaatcgatgccggcgctgcgcgcaaacgggctgaggattgaaaacgccgtggcaaccgcaagcccgcccagtacgcggcgccgcccgtgatccacgccattcacaggcagcgctcccagtcttcgcgcaccgtggcaaagcccaataagtcttcgtacacgccatttttgagaaacgcctgacgcagacatccctcaaaacgcaggccaattttctccatgacccgcgccgactccttgttgcggccaaagcattggctgcccacgcgttgcaaccccaactgggtaaacccgaacgccatcatcgcgctcgccgcctcagcggcgtatccccggtttcgacagtgtcctgccacccagccaccgaggtggccatagtgatggcgcgcattgatccgcaggctgacgatacccaccaactcaccggtttcgcgcacatgcatgcccaggttgagcaagtcgcccgcacggtatttttcctcgatcgcagcaataaaactctgcgccgtttccagggtatagggcgatggaatattcgccgtgttatccgcgatgtttggtccgttggcgagggtaaaaagcgcctcggcctggtcgctttccagcgcccgcaagagtagtcgcgatgtggtcaatcgaggcgatgcagtcggcatacgaggtggctcggaaagtaaattctccaagaatgtacgtccattgtgtcaatttcactacgtcacaaaactgcaaggtaaatctcctgaaagacctttcctagagccttcaaaacgtaaattaaagttaaccaatcggtcatttttggttgttagcgtgtcgcccctaattcaatgacggggtaacggaatgagaacctgggacgaacccaaaaaacgcaaggcgcacatcgaactgatcccgatgatcgacgtgatgatgttcctcttggtgtttttcgtactggtgagcctgaacgtaattccggccctcggcatgaagactcagctgcccagcgccagcagttcgcagcagctcaaaccgcagaacaaattcatcctgaccctgggcctggaaggccagctgcaactggatggcaaagacctcacggtggatgccttggtaccggcgttgaaggcggcggaaaagccggacaccaagtcgacgatcatcgtcaatagtgacaagggcgtcgaggtttcgcgcctggtggaagtgatggacaccctgcgcctgggtggcttcacctccgtgtccattgccacgcgtaagtcctgatcatgtacgccttgtttcgtgcgcgacagctgctgggcagtgtcccggccctgatcgccctggtgctgattgcaatgggcatccagtcacagacattgaaggtcgagccggtctacgacgagtcggcggtcgagctggcgctggtcgagcccgagccggaagtggtcccggagccggtggtggaacaggagccgccaccgccggtgatcgaggatgaagaggccgagccggcccctcctccaccgccgcccaaaccactgcctaaacccaagcctgagcccaaacccaaacccgtgcccaagcccgtggttgccaagccagccccaacgccgacgccgcccccggttgccgccaaaccggcccccgccgctgtggcacagaccgcgccggcacctgcaccgccagcgccgccgaaggtcgatggccaggcgctcgaaggcggttacctcaaaggcctgcgcaacgagctggacacctacaagcaataccccaccgggcgccaggcgtccctcgaacgccccagcggcgaggtggtggtgtggttgttggtagaccgccagggccgggtgctggactccggcatacaaacccagacgtcaagcatgctgctcaaccgggccgccaccaccagcttgcgtcgcatcaagcaagtcaagccgttccccgagcaagccttcggggggcgcaatgagcagcgcttcaccgccaccttcaactacagcgtgcaataagcacccgacaccaggacgacagtgatgaggttcacacggattcatctggcactcgttgccgcaagcatgggccatgggttcgccatggcagacaccggcgacagtgacgtcggcacgattggcgtgcagggcaaggccacctccggcggcggctacatggtgcaggaagaaagcatcaagggccgctccaccgtgaccaaggaagcgctggataaacagaccgccaccggcaacgcgatcgacaagctcaagtacaccccgggcctgaacatctccagcgaagacaacaccgggctgtcgggctttcgcttcaccatgcgcgggctcaactccgaccaggtcgggatgtcggtggacggcatgccgatcaacgactccggcaactacgcgctgtattccaacctgctgggcgacccggaaaacatcgaccagatcttcgtcacccaaggctcgtccgaggcggacggcccgcacatcggttccagcggcggcaacatcggcatcgtgaccattcgcccgaccaaggaaaccggggcgttcgtcaaacagatcgtcggcagcaacgccacccgcaagaccttcgcgcggctcaacaccggcgaggtcaatggcctgagcaactggctgtcggtgtcgcacaccgaaggtgacatgtggcgcggttcgggcgcggtgcgtgcggacaaggtcgaatggaacagcttcttcgacgccggcaacggcaacaccgccaacctgatcctcaagtaccacgagcaagacaacaacagttacagccagctgaccaaggcgcagttccaacagtacgggcgcaagtacgacccctaccccgccaacccggccctgggcagcaacggcaaggtcaacagctactacgccctggcgcagaacccgttccagacctttaccggcgtgctcaacactcaattcaaactggccgacaacctggccctgtccgtcatcccgtattactactggggcaacggcagtggcgtgggctcgtccagctatccgctgaaccgcggctcgaaccagggcggcgttttcgacctgggtaacctgcccaccgccgcgcaatacaacgccgacggctcctcgaccactggcgtctactaccgaccttcgcgcacccagacctggcgcccgggcatcaccaccaaactgaactgggacctgggcgaccacagcctgcagttcggctactggtatgagcgcgcgcgccaaagccagacccagccgttcattgccctgaagaacagcggcaaaccgagcgacacctggcctgacggcaacgccgtggtcgatgccaacggcaacaccgtgcaaggccgcgaccgcttcaccatcacccccgcgcaaaaggtctgggcccaggacacctggtacatcaattcggactggaccctgattgcgggcctggcctacatgaacgtcaaacgtgacggcaccaaccacggcagcctcaccgagcagccggaaaaacgtaaccagagctacaacaaactgctgcccaacgcgggcctgaaataccagctggatgagcgtgaccagttgttctacagcctgtctcgcaacatgcggattccgcagaactacgtgctgtacgacaagggcctggactcgatcaactccaaaccggaaaccagctggaaccatgaactgggctggcgcttcaccgatgaagacatgaccgtggcggctaccttgttctacatgcagttcaaggatcgccaggtctcgtccaaggacatcaacggtgacttcgccgacatcaacgccggctccgtcaacaacagcggcctggaactggagtggagcggcctgctgccgaatcacttcaactactacacctcctacacctacaccaaggccgagcagcaggacgatttgaccgtctacaacgccggcaaggccatcgtgttgcccaccagcggcaagcagttcgccaacgtgccgaagaacatgctcgcggccaacatcggctacgacgacggccgcttctacggcaccttcggcggcaaatacaccagcaagctgttcggtgacttgaccaacgatgaggcgatttccggccgcaccattttcaacctcggcgccggtatctacctgcctgtggacaagaaagtggtcaaggacgcgaccctgcgcctgaacgtcgacaacctgttcgacaagaaatacctggacggcgtgtacaccaccaaaaccaacgcgggcacctacagcggtttccgcgacggcgacccggcgtacatcgtgggcctggaccgcacggtaacggtttccctggaagccaatttctaattgcgaggttaagcaaacatggacatgaacctgctccacgacatcaccttctatgtgatgtacgccgccatggcgattgcgatctttatcagcatcgagcgcggcatctacttcgcctatgtgcggcgccaggcccgcgcactgaccgaagtgctcggcgccaacgtgcacagcgagcgcgacctgccggaaagtctgacccgtcgcgacagcctgccgctgaacatggtgcgcccgatcctcgcgcaaaaggccagccatggctcgcgcaaggacctggacgatgaaatcgaaacccagtacctgaagacccgcgcaccgctgtcgcgcagcctgtggatcatcgaaaccatcaccacggccgcgccgctgttgggtttgctgggcaccatcctcggcatcatcgacaccttcaaggcgctggcatcggcaggcgtgtccgacccggggcagatttccggcggtatcggtacggccctgttcgccacaggcctggggattgccatcgcgctgttctgcgtggtgttccacaacttcttccaggacagcctggagcgcatcaacgaccagctgaaaatcctgctgatccgcgccgccaccggtgcccgtgtgcagggtgaagtgccgcacctggtgccgaccccgctgcacagccgcaccgcctgaccctatggggtgagcgggcttgccccgctcaccacgggtactgcgctcaccgctttaatgcgcccgcctttctttttgcccgatgagacgcccatgcccctctcgatgaagttgcgtatcgcaggcctcgccgcctctctcctcagtccgctggcccaggcggacttttcgattccggggtttgaactggtgcacaccgtgccggtggacaccgcgcttgccaccgccgatttgcgccagccggggcccgtctggatagagctgttcgatggcgcaaaaagccacattgatatcggccagttctacgccgccgaccaccccggctcagtgatggacagggtgatcgaacacctggaagccgccggcaaacgcggtgtgaagattcgctttctgctggaagaaaaaggcatcaaattgtcggaagcgtccaccctggaacgcttgcgggcaatccccaacctgacctttcgcgtgttgccctacagccagttgagcggcggaatcatccacgccaaatacatggtggtcgacggcaagcaggcgtttgtcggcagccagaatttcgactggcgctcgctggagcatatccacgaaaccgggctgcgcatcagcgatgccaccgtggtcggccaggtgcaggcgatcttcgatcaggactggaatgcccaggcggcgctgagcgccaacacacccgtgccgctgccggcggcaggccaggaacctgcgcgcaccggcaattatctggtggccagcccgcaacgctacaacccgccaggcgtaggcgactcgcagctggaactgccgcgtctgctgggcgaagcgaaaaaggaagtgcgcgtacagctgctggactatgcgccactgtcctacgggcccgataaaacccgcccctactacgccgtgatcgacaacgccgtgcgcgccgccgctgcacgcggggtgtcggtcaagctgatggtgtccaattggaacaccgacgcgctggaactgccctacctcaagagcctggcggtgctgcccaatatcgaggtcaagatcgtcaccctgcccgaggccaaacaagggtttatcccgtacgcgcgggtgattcacagcaaaaccctggaaatcgacgggcaagtggcgtgggtcggcaccagcaactggctgggcggctacctggataactcgcgcaacctggaagtggtgatgcgcagcgaggcgatggccaagcgcatcggggaactgcatgagcagttgtgggatgggccgtatgccaaggtattggatgtagcggcgcagtatccggagcctcatcccggcaagccttgaaaacccaggtagaaaagcccaccgaaaaccctgtgggagcgggcttgcccgcgatagcgatgtatcagccgaagcgggagtcaactgacataccgccatcgcgggcaagcccgctcccacatttggacattcgaaattcctggcattcgagtacgacatttctgacaccaacgtctcccaatccagagcgtggtgatggtagtgtgtgaaaatgtttctgacagttcgatcagaaacctcttactcacgacctgcaaaggaatgctctatccatgcactttccactgaaaaaaatcgtggcggccaccttgttcgccgccagcctgtcggccgtcgccagccctgcttttgccaacatcaccgaacagcaaagcgcagcgattttgaagagtttcagcgaaacacccgtcactgatttccgtggtttcctcggcaccctggccaagggcgacctgggcaaaaccgctgacgtggcaccggccatcagcgccttcctcgacaacaaaaccctgagcgccgaccagcagaacgaaatcaaccgcttgctcggtatttatacccgcgtgaaatacggcaaggccgccctcgaaaccctgcgcgaactggtggaaatcccgacgttcaacgtcgatggcctgccgcaatacaaaaacccggaattcctcaagatcgccgcaaagattgaagccttggccaaaaccttcaacctgaccttccgcaacatcgataaccgcgtctacgagatcagcctggaaggcagcggcgatgaagtggtgggcattcacgcccacgccgacgtggtgccggtcaccccggaaaactgggtgctcaaggacggcaccaagctcgacccgttcaaggtcacgctgatcggcgaccgcatgtatggtcgtggtaccgaggatgacaagaacggcatcgtcgtggcgatgtatgcgatgaaagtgatcaaggaagaaaagctgccgctggcgcgcaacttcaagctgctggtggacaccaccgaagaaacctccggcgacgcgatcccctactacttcgaacacaacccgacaccgcaatacaacctggcgctggacggcggctacccggtggtgatcgccgagaaaggctacggcaccgtcatggccaccttcccggtgcgcaagggcgaaggcaaaggcgcggagatcatttcgatgaccggcggcatggcgaccaaccagattccatcggtgtcggttgccaccttggtcagcgacaagccggctgaactggcggccagcctggagaaagccggggcggattacgccaaggccaacggtggcgattttgaagtcgccgccacagtggtcggcaaagacgtcaagctgacggtcaccggtgtgtcggcgcactcgtccgcgccgcaaacgggcgtcaacccggtcgcgcgcatgctggagctgatccacagcgttgacggcaagatcgccctcaagcacaaccacatcaccgatgccgcgcgttatgccgccgacaactggggcctggactacctgggcggcaaattgggtgtgggcttctccgacgatttcatggggccgctgaccacctcgctgacctttgtcggtcaggatgccaaagcgttcaaactggcggtgaacctgcgcgtgccgaagggcaagtcgccggagaaactcaaggctgaaatcgccgacaagctcagcgcctgggacaagcagtccaaggtaaaagtgagcttcacctactcggtggccgcgccgatgtaccgcaacccggaaggcgaatgggtcaaagccctgctggccgttgccactgaaaacctcggcatggagcacaagttcggcacctccgccggcgcgacctccgtgcatgagctgcccaacggcgtgcaatttggcctggcgcgcccggaagagaaatacaccgggcacaccgacggtgagttcaagaccgtcaaccagttcctgctggacctgcagatcgtcaccgaaatgatgggccgcgtcgggcagttaccgaagctctaaaggccccttgagcccgccgcaatggcgggctcatcgcatcaggatatcttcgaaaaacgcgccgatcggcaaagtggggtggcagagttgaatctccagcacccacaccatttcactgggtgtgatctcaaggtcagccaaatccgtattgccgaacaacgcatggggaaagtccgcgatacggtggcctgccaggttgcgggacaggcgccagcctttcgacacggcgcggtcttcggcaaagtcgtagagctcgcagccagtcatgccatgcagccaggcttcgcgggtttcatcgaagacttcatgcaatgccttgcggcaagccaggtgcagcggcgcctcaccgaagatgaaggtatcgccgtagtcaccctcgtagccatcccacaccgggccaaggtccaccaccacgatgtcactggggcgcagggtgcgcagcgggtcgatcccttcccggggcgggcggaccgtgtcgtcgccaaagcggatgtaggttgggtgccaggtgtgggaggcgcccatggcttgcagcgtttggctggccatttccagggcggcgccggtggtcatgccgaccttcaagtggctggcgatggcggccagcgcgcgcacggttttttcacgggcggcgagcatgccgtccagagaatagcggggcccgactttttcccaggttttatccagtgaatcgagcagcgtgccgacgctctcctggccgctcggtacaaaggcttcggcgacaaaccgatggctcggcaaaccggcggccaggcagtccgtgcgtgtgtgggcaatcatggcgccgttaccgcaggcatatacctgggccgcgccccagtgatggccgtggctcagcgcaacttcctgcacccggccttcggacgccaataccgggtgccaatgaaaacgcgggtggtcgatcaccgattggtcgaggaatgcgcggtcgtaaaagtcagacgcctgcgcaccgccccagtaaaacgtcacgtccacatcacgtttcaaggccgtctgcagaatcggcttgatacccgcgtagccggtgcccgtggcgaacaggaccacaggcgcagcgtcatcgtcctgccaggtgcaggcgccaaacggcccttccagttgcagcaggtcgcccgcctccaggtcgcccagaatggtctcggaaaatagcccgccgctcacccggcgaatctgaaacaccaggcgcccgtcgccctcggccggcaggttggcgatggagaagcaccgcgagtcgccaccggccaggcggaacttgaggtactggcccgcccgcacggccaacggcatatccggcatcaccaccagctccatgatgtcggggctgagtgcgcgtttgcccagcaccgttgcttcgacgaccagcgcgggcgtgtccagtgaccagccgggaatctccaggcgcatgtcgccgcaggcatggctttggcacagcagcatttcattcgccgccaaggggtagctgggtgccggggcgcccggtgccagtggcttggcccggtattcgccctgcgcgaccacgaccttgcaggaaccacacgccccgcgccggcaagagaacggcacaggcaggccgctggcgagcatggcgtccagcaacagttcgtcgcccgcctcaaaggtcgtgcccgagggggagagttcgatgacatggtgtgggttcataaagacctcagggtgggtgaggccttgattgttgcgctagactgggcccattagaacctccagttttggatacttcagatggtccagatgcgaaaatggcgccccttgctcaagctggatgaaggcgcggcccaggcgacctatcgcaagatcaccgaaggcctggtggccgcgattgtcgaggggcggctgccgccgggcaccctgctgccgggcacgcgagaaatggcgcagttgctcgacgtcaaccgcaagaccgtgatcctggcctacgaagaagccttgaccaaaggctggctggtcagcgagccgcgtcgcggcacgttcgtcaatacgcaactggccgcccagcccgccgcccgccccgcgcagcagtcctttgcaccgcgaatcctggacaaggccgtggtcccgtatttcacccagaacgcccaggtgattgccttgcagcatcggcatgacgcgttgtttttcgacaacggcgcctgcgaccatcggctgttgccgcaagccgttttgcatcgttactaccgcaatgccctgcgcagcagttttgcctccaacactgtgcgctatggcagcgaaggcacgggctaccatttgcgttgcgcgctggccgagatgctgcgcagcaaccgtgggctggcggtcagcgccgagaatatctgcctgaccccgggcacccaggtgtcgctgttcctgaccgccagcctgctgatcaaacctggtgacgtggtgctggtagagcgcctgagctatccgccggcgtgggagatattccgcaggctcggcgcgcaggtggtcaccgtcgacatggacgaagaaggctgccgcaccgaccacgttgaacagctgtgccaaacccacgaggtgaagctgatttacctcaccccgcaccatcagtttcccaccaccgtgagcctgcatgcggcacgtcgccagcagctgttggcgctggcggcacggcacaatttctgtgtgatcgaggaagactacgaccacgaatatcacttcaacgggcgaccgtacctgccactggccagcgacaacgcgcagcggcatgtggtctatatcggctcgctgtccaaggccctgggctcgacgtttcgctgcagctacgtggtcgcccccacggatgtgatcgaggccctgcaaggcagcgccgtactggtcgtcggcgacaccgacgccgtcgcacagaaaatgctggctgacttgatcaacgacggtgaattgaagaagcacctgcgccgggtgtcgaaagagtacgcggcacgccgcgaagtgttgcagggctgcctgcatgaaggcttcggcgagcgtatccaggtgcgtgagccggaaggaggcctcgcgttgtgggtgcgtttgcaggatgcaaccgatgtggaccagtgggtgacacgcgccctggaccacggggtggtggtgcgcagcgcgcgccagttttcgcccttgggtttgccggaaaatgcgctgcgcctgggctttgcttcgctggaccgggatgaaattcgtcaagccacgctgcgcttggcgcgggcgctggacgcacgttgaaggtacccataaacaaaaacgccggtcatcactgaccggcatttttgtttagagagggagcaggaaccgcgacttctcttccgcccgggcgagttcggggaactccagcaacaacgctctgttgccccggccaatgtgcgccatcaccgcccgggtaatgtactcacgcaccataccggtggagacgtaatacatggcccaggcttgttcgggcgtacagtgaccgatctgttcctcaatctccgagtacgcgttgtcatcatccggctgcacgccgcgctgataatcgatttggcccatgctgtctctccctcactggcgcgcctgaatcagtcgccgatcacgtaccgctcttcaccttggtccagacacgtgtgcggatccgctccagcttcaacggcagcggttccagtggaaccagggtggcgatggtttctttggagggataaatccaggggttgtcgcgcaacttctgctcgacaagcaccgtggcatccttgttggcgttcgggtaaagcgtgtggtttgagctcttggcgatcacttgcggttcaagcatgtagttgatgaacgccagaccctgccgggcatggggagcgtctttgagcagcacaaagttttccgaccataccagcccgccttcgcgaggcaggctgtaggcaatcttgcgcccggtgttgtttttttcgttgatggcctgcgccgtcagcgccccgctcgcccagcccacaaccacacagatattgccatcggcaaaatcagcgtcggttctggaggagtcgaaatagaggacgtaggggcggattttcaacagcagtgcctgggccttctggtaatcctcagggttctggctgttactcggcagcccgaggtaatgcaaggcgatggaaatgatttcgctcggggagtcaagcatcgccacgccacacgacttgagcttgctgatgttctcttccttgaagatcaggtcccagctgtccacgggggcgttatcgcccagtgcggctttgactttatcaacgtcgtaaccaatgcctgtggtgccccacaaataaggcacggcgtacttgttcccaggatcgttggtcgccaacagggcgagcatttcagggtcgatgtgggagaagttgctcaactggctacggtccagcggcgccagcacgcccgcctggatcaggcttggcagtacatttgaagtggcgacaacgacgtcatacccggtgcgcccggccatgactttgctctgcatgatttcggcgctgtcgaaggtatcgatgtggattcgagtaccgtctttttgctcgaattccttgggcgtttccggcgcgatcaacccgaaccagttgtacagattcaccctggtttcggccgccctggcgggcgcactcacagcaacgcaaacaagcgaggccaataaaatggctcgcaaatgtgattgactcatccaactttccttgtcaaaacgacaggccttcatggcccttatccattgggtggtgaatatacccggcagcgtcgaatagtaaatacctacaaatacttagctttaagccaagaacacctaaccctaaaggggtagaacatgtcactcgaccttcataacctcgcctggcatcgatccgccgggatgctgatcatgcagttgaaccgccctgccttctggagctcgctggttcgcgtgctgaatgagtatgtgcagatcgataactgggttgttctggtgttcagcgatcaacaagtcaacgttatcagcgtgactgaggtcgccgacgcggaggagctggacgccctgacgcaacgctatgtcaaaggcctttatctgctggaccccttttacattgccaaccgcgagaacccccagagcggttttttccacctgtccgacattgcgcccgaacatttcgtcaccaccgagtactaccatcagtatttcgcccaatacatcagcgcggatgaagtgcaatacaacgtgcaactcgacgcggatagaaccctgtgtatttcatttggcagcaacgcgcgattcagcccggagcagatcgccacactggagatcatcaagccctgggtgctggccttgatgcatcagcgtatgtgctttgagattgacgtcgaaaaaaacctcaacgagccgcccccctggtcggaagcgatccttcaactgggcacgcagatcaccgcacgtgaaaaggacgtactgaaattattgctcagcggtttctcgaataaagagattgccggcaaattgtcgctctcggccgaaaccgtaaaggtgcaccggcgtaacctctacaacaagctgagcatcaagtcacagtccgaattgttcgcgcgttttttcatgccgaaacaagaggcccacgcggtgaattgatttcgaccattcaattcgccgcgccaaggaacggcagcgccaggtacaacttgatcacgatcgcgttggtgatatcgatgaaaaacgcccccaccatcggcaccaccagaaaggcaatctgcgaagggccgaagcgttgcgtcaccgcctgcatattggcaatggcggtgggggtggcacccaacccgaagccgcagtgccctgccgccaaaacggctgcgtcgtagtggctgcccatgacccggaaggtgacgaaaatcgcgaacagggccatcagcaacgcctgcgctgccagcagaatgacaatgggcaaggccagtgcagccagatcccagagcttgagcgacatcagtgccatcgccaggaacaacgacaaactgatattgcccagcagcgacacctcacgctcgaacacctgatgccagccgagtgccgacaaaccgttgcgcagcaccacgcccacaaacagcacacagacaaaggttggcagctcccacgccgagccttgaatcaacccgctcaggaaggtgccgacctgcaagctgatcgccagcaaggccagtgtttcgataaaagagaacgaggtgatcatgcgttcctgatgaggctgctcaaacccctttggcaggcgcggttgtgcattctcggcaccgggtacccggacccgttttatcagcaggcgcgccactgggccgccgatcaggccacccaataccagcccaaaggtcgccgaggcaatggccagttcagaggccgacgccaggccatacttctcactgaagactgccgcccacgcagcgccggtgccatgcccacccgacaaggtgacagagcctgccaacaaccccatcaacggatccaggcccagcacctgtgcgagtgcaatgcccatggcgttttgcatcaccagcaaacccgtcacgactaacaggaaaacccccagcacccgcccgccttgtttcaggcttgcgaagtcagcgttgaggccaatcgtggcaaaaaacgccaacatcaggggggcctgcaacgaagcgtcgaaccgcacttcgatacctgccagcacgcgcaacgccagcagtaacgccgcgaccaacaaccctcccgccacaggctcgggaatgctgtaggtgcgcaaaaaaccgattcggccaaccagccagcgccccagcaacagcaccagagaggccgcgaccagcgtggaatagaaatcaagttgaagcatgtgggcagctctctggtgtcagcaaacaaaagaagctggccagagtagagatcatgaagcagacgcacacctgcacaactgtaagtacagattatttccaggcacctggaaattagtcctacacgcgagccagataaaaagtcagcacaaacaaaaacgccgatcattgctgatcggcgttttcgttaaatatggagcgggaaacgagactcgaactcgcgaccccgaccttggcaaggtcgtgctctaccaactgagctattcccgcaaatggcgtcccctaggggactcgaacccctgttaccgccgtgaaagggcggtgtcctaggccactagacgaaggggacacacaactgaaacacatggtgtgtatttcagtgtccagagattaaatccgaagattatgccctggtttcactcagcgccacccgagggcaacactgcttaaatttggagcgggaaacgagactcgaactcgcgaccccgaccttggcaaggtcgtgctctaccaactgagctattcccgcatattggcgtcccctaggggactcgaacccctgttaccgccgtgaaagggcggtgtcctaggccactagacgaaggggacacacgtacaacattcactccctaccgcgtttcgctgtgtgctttacgctgtaagtggcgcgcattctatggatggattgaaaggtcgtcaacccccaaggataaatttatttaaatcaatgacttcgcccctctttccgggcctttgcgccacgttgccccgtccggaccttgacgcctatattctggcgcccgacaaggcgctatagttcactcgggcaaatgatggcaatgtgcatccacacagataacgcctacctatatagaagaaactccctgggcaactggtcgaacagtcctatccgccaggtggcccagtcactacactcaacagcaaaccctataaagaggtcacaccggtgacaccactcatgatcaccctgctggtaatagccgggatcgtaatactgatcgccattggctacatgaaccacgtggtggaaaacaacaagctggaaaagaaacgcaccgagatcgagcttaatgatcggttgcgtcgttgcggggaaatcaccgagaccttccctggccagttgatgacgccggcgctcaagttgttgctcactcgcctggaactcaacgtcaaccagcgcctgctggccctcaacaagtccagtgcaccgctcaaggcgcgtatcaccgaattgaatacgctggtggctcagggcgaatcgatcccggtcaccaacccgccctccccgatccagaccgaagccaaggccaaggacgtgcgtttcctgctggaggcgctgcacggccaggtaacccgtgccgcccaggacggtttcctgccggccaacgaggccaagcactggatcaaggaaattcgtcatattctggtattgctgcacatcgagttcttcaacaacctcggccagcacgcgctgcaacagggccagccaggccaggcgcgcctggcttttgaacgtggcgtgcagtacttgcgcaagcaggcggaaccggtggtctacagcgcacagctgcaattgctcgagaaacaactggcccgtgccaattcgaccgtgctgaccaacagcaaaccggcggaagatgaggtcaacgagctgaccgaaggcctgaaagtggtagacaccgacgcagactggaagaaaaaagccatctacgactgatcgcccttccccccatgtggcgagttcctcgccacatgccatcaaattgcatctatcccctcgcccccgactagcgtaaaaaagtgcccctcactccgtgaagttagaggcctgctatgcccgtcgccgtgattgatggacaaccgctgcattatatcgaccagggcaccggcccggtcgttctgctgggttcaagttacctgtggggccatgagatgtgggccccgcaaatcgaggctttgtcgcaacagtatcgtgtgatcgttcccgaactatgggggcatggcgaatccggcccgttgcctgcgcaaacaagctccctggacgatctggcgcgccaggccttggccctgctggatcagttggacattgcccaggtcaaccttgtaggcctttcggtcggcggcatgtggggcgcacgcctggcactgctggcccccgagcgcgtcaacagcctggtgttgatggatactcatctgggcgccgagcccgaggccacgcgccagtactatttttcgctgttcaagatgatcgaagatgccggcgccattcctgagccgttgctggatgtggtcgcaccgatcttcttccgcccgggtatcgaccgcgaatcggcgctgtatcaggattaccgccagtctttacaggcgtattcccgggagcgtctgctgcacagcatcgtgcccctgggccgtgtgatcttcagccgcgccgatatcctggaccagctgccgcgcctggacgccgacaccacgctggtcatgtgcggcgagcaagacaagccccgcccacccgccgaatcacgggaaatggccgagctgatcggctgcagcctgattctgattcccgaagccgggcatatcagcgccagggagaacccggacttcgtcaacgaagcactgctgaccttcctcgccaacaacgcctgacactctcccctgtgaccgccgcattcacgcggcgatcacaggcggaaatgccccaccatccccttgagctcggcccccaactgcgccagttggatgctcgacgcggcattgccctgcatgctcaacgccgactggtcggcactggctcgaatgctggtgacgctgcggttgatctcttcggccactgagctttgctcttcagcggcggcggcaatctgctggttcatctgctgaatcaacgacacggcggcggcgatgctgcccaaggcactttcggtttccagcgcatcactgaccgccagtttcaccagttcaccgctgtgctggatttgctgaacggacgattgcgcggcattgcgcaaggtactgaccaggcgttcgatttcttcggtcgattgctgggtgcgcttggccaacgcacgcacttcatcggccaccaccgcaaagccacgcccctgttcaccggcacgggcggcttcaatggctgcgttaagggcgagcaaattggtctgttcggccacgcttttgatcacactcaacacggtgccaatgttctgtatctccgcactcaagctttcgatgctggcactggcgctggtgctggaggtagcaagcaactcgatacgttgcaggctctggcgcaccacctgctgaccgctgtcgaccttgtcgtcggctgtctgcgcggcttgcgcggcctcttcggcattgcgcgccacgtcgtgcacggtggcggtcatctggttcatcgccgtggcgacctgttcggtttcttccttctggctgctgacctcgacgttggtctgctccgtcacgctggacagcgaatgcgccgagctggccaattgctcaatacccgcctgcaacccgctgaccatatggctcaggccgttgcccatctgctgcatcgcctgcatcaactggccgatttcatcacgccgattgacctccatgcgcccactcaagtcgccggaggcaatttgctgggcgacggcgataacactgcgcaggggcgcgacaatcaaccgggtgatgacccacgccgcaatcaaacccaccaataacgccagggccgaggagccgatgatcagcagcgcgcttttcttcaattgcgcctgcatcgactcatcttcagcggcataggcctggttgacccggctgaccacgtcgtcagcgcgatcatgcaactgtttgtagaccgccttctcctgtgccagcagcccggtgtactcgccaagcttttcgctgaatgaggcgatatgcccggacacttcattgagcacggtctggtaaccggcatccttgaccgaggttttcagcagttccacctgagccaaggcctggtcagcctgctcgatcttgccctgcccggcatcgtcggcatccgctttgcggctctggtccaggcgcacccgcgcctcgttcatggcttgcaacatcaaccgcgagacctggctgacctggcccgcctgctcgataaactcggcgccgtccttgccctggctttccttgaggccataggcaccatcgtctgccaggccggcctgcaatacatcaaggttattggccacgctggacaccgaccaactggccatttccaacgcgaggtctttggtctgggtcaattcgacaaactcgtcgaacgcctttcgataagccgccagcgcgtgttcgacgtcggtcatcaccggtacgttggccgcagactgcgccttgaggctggcggccagcgccgccagggcatccacattttcatgcagggcatcgacggacttggggtcagcgtgcagcgcgtaatcctgctcgatcaagcgcaccctgagcaggccgctgttgagcgaagacatcgccttgaggccttcgaaacgctggccaaccgtttgcagggaccacacgccgatggctgccaccaacgccgtcagcatcagtaccaacaagaagcccaagcccagttttttcgccataccgaggttggcgaagcgtcgttgcacggccgaaatcattgcacttgatcctcttgcaatggcagatgccatcaagcccggtttccatgaggcgagattcgcaaccacgcgccaccgacacaagggattggcgccacaataatggcaaaaagctacacgcccgtcgttttcagaatggtcgaggtcgatctggcgggccccatggcgcgaaacagcgcgagtgcccgctgatcatccgcgcaggccacattgatgcgtaaccaatcgctgtgttcacccgttgggctgaacagggctgcgggcgacaacaggacgcatagtcgccgggcgctggcctgcaggcgtgcgcggtcgccagcgccagggcgggcccatacaaacatgccccctgcaggctcggcaaacacttcccactcctcgtcctccagcacctgcaaggtggcggccatttgtgcattcaaacgcttgcgcaagcgttgcacccatttacggtaagtgccattggccagcaacgtggccaccaccgattcggcaaagcgtgatgtgctgatacccgtcaatgtcttgaggctggcaatttgcgcaatgagcgtggcactcgcgctgaggtagcccacgcgcaaggcgctgctgagggtcttggagaaacttgagacgtagatcacccgcccctcatgggccagcgccgacagccgcgtgcaactcgggtgctggaggtcgccgtagacgtcctcttcgataatcaggaagtcgtcactgtgcgccagttgcagcaaacgctcggcgacaggccggcacaggctggtccccgtagggttgtgatacaggctgttgatgaacaggcacctgggacgatggcgttgcagcagcgcctccaatacccggatatccgggccgcccgggatacgcggcacttccagcagtttgacgccatggcgctccaactggcgatacaggttggcatagcccggggtctcgaccacgacggtatcgccggccttgagcagtgtgcgtatcaacaggtcttgcgcatggctggcaccgtgggtggtgagaatgcgatcaaggctggtggtcacgttcatccgggtcagccgcttgagcagttgttcgcgcagcgcgggcagccccaatggcgtgctgtagctgaacaacccggccgtatcggtacggctgacttcgcggatcgcataacagaggtcatcgctttcgcgccaggcatccggcagccagccacagccgagtttcaactcgcccagcgggctgtcgaggtaggccccccaccccagctccgcaccttcataccactggctttcctggaagaccggcggctgagccaccacgaaccccgccccctgcttgggctccaataccccttgggccaccattcgctcgaatgcctcgaccacactcgactggctgagcaaattgtcgagggccaattgccggatagacggcaagcgggtaccgggccccgccccgctgctgcgaatccattgcgccactgcactgacgatttgctgaaccaccggtacaagggcctgtcgatcgatccctaaatccatgcgccactcacttcaactgtctgttattcaaccccaaacagttaagcacagaagcccgattcagccggccgccaaaatttattaaagtattgattttgcttgattatttacctactgatacacattctgaacaggccatgtgccagccatggaaagcccccacaacctccctatccttttcgaacagggagcggcatacagtcttagatagccgttgcgccaccgtccacggccagtgcctggccagtggtgaacgccgcgccatcgctgcatagatacagcacggcactggcgatttcttcgactttgccaatccgcccgaccgggtgcatggcggcagcaaattcggctttgcgcggatcggcttcataggcacggcggaacatatcggtgtcgatcaccgccgggcacaccgcgttgacgcggatcttcttcttggcgtactcaatcgccgcagatttggtcaggccgatcacggcatgcttggacgccgcataaatactcatcttcggcgccgcccccaaccccgctaccgacgcggtgttgacgatcgccccgccgccttgagccagcaacagcggcaactggtgcttcatgcacagccatacgcccttgacgttaacgcccatgatcgcgtcgaactcatccaggctgccatccgccagtttgcccttctcgatctcaatcccggcgttgttgaaggcgtaatcgaggcggccgtaggcggccacggtctgtgccatcaattgctgcacatcggcttcgagggtgacgttgcaccgcacgaacagcgcctccccgccggcttgctggatctgcgcgacagtcccctcgccgcccgccacatccaggtcggcaaccactactttcaagccttcagcggcgaacgccagcgcggtggcgcggccaataccggcggcggcgccagtcaccagggcaacctggccggaaaacgtcatgctcatgggagagtcctatggaagaaatagccgtgggccgagtctagccaaccccggggcgagcgtggcagcactatcaggacaccggttggcaccccatgaatcacagtgataaagcgccggggcttattatcatccagagctatcgacgggcattcgcgcctgcggcaccaccttgtgtccagggtgttgagggtctatcactcaaggttcatttctcaagagtccctgccatgactgcccagaccaaccgccaattcctcctcgccaaacgtccggtcggcgcggccacgcgggagacgttcacctatcaggaagtgccggtgggcacccccggcgatgggcaagtattggtgcgtaacgaatacctgtcgctcgacccggccatgcgcggctggatgaatgaaggcaagtcctacattccgccggtgggcattggcgaagtgatgcgcgcgctgggcgttggcaaggtgattgcgtccaaccacccgaaatttgccgtcggggattacgtcaacggcgccctgggcgtgcaggattacttcctcggcgagccgcgcggtttctacaaagtcgatccgaaactcgcaccactgccgcgctacctctcagccctgggcatgaccggcatgaccgcctacttcgccctgctcgacaccggcgcaccacaggcaggtgaaaccgtggtgatctccggcgccgctggcgcagtgggcagcattgccgggcagattgccaaaatcaaaggctgccgtgtggtcggcattgccggcggtgccgacaagtgcaagttcctggtggatgagttgggtttcgacgctgccatcgactacaagagtgaagacgtgcccgccgcgctcaaacgcgaatgccccaaaggggtcgatgtgtatttcgataacgttggcggcgacattcttgacgcggtgctcagccgcctggcactgaaggcccgtgtggtgatttgcggcgcgatcagccaatacaacaataaggaagccgtgaaaggcccggccaactacctgtcgttgctggtcaatcgcgcgcgcatggaaggttttgtggtgatggaccatgcggcgaatttcgccgcggccgggcaggaaatggccggctggatggcgcaaggcaagctcaagagcaaggaagacatcgtggaggggctgcagacgttcccggagacgctgatgaagttgttcaacggtgagaacttcgggaagctggtgcttaaggttagttgatccacgctcgatctaaatgtgggagctggcttgcctgcgatagcatcaactcggttttaacagaagaaccgagttgcctgcatcgctggcaagccagctcccacattttttacggtgttcgccctggaatcaggcgatctcggcgaccactgccgccaacgccttggccggatccgccgcctggctgatggggcgaccgatcaccaggtaatcagagcccgcgtccagcgcctggcgcggggtgaggatgcggcgttggtcatccaccgcactgcccgccgggcgaatccccggtgttaccaactgcagcgacgggtgcgcagctttcagggcctgggcttccagcgccgaacataccaagccatccaggccggctttctgggccagcgccgccaggcgcaacacctgctcctgcggctcgatatccaggccaatgcccgcaaggtcttcgcgttccatgctggtcagcacggtcacaccgatcaacaagggtttggggccactgcgctgctccagcacttcacggcaggcgttcatcatgcgcaagccgccggagcagtgcacattgaccatccacacgcccatctcggcggcggccttgaccgccatggccgtggtgttggggatatcgtggaatttcaggtcgaggaacacctcgaagcctttgtcacgcagggtgccgacgatttcggcggcgcagctggtgaacagttccttgccgaccttgacccggcaaagcgtggggtccaactggtcagccagcttcagtgcggcgtcacgagtggggtaatccagggcgacgatgataggagtctggcagacggacattggaatgggctctcaggcaagtcgaaatcggcgcggattgtagcgcaagcgacggctttgcgggatccgatgatcggtaaatactgacaggccgccttggggcggcgatttcggcctattgtatcgagcccgatacattcacgacatgcccccaacacgccccgccgctagcctcgcgcacatgaccgaccgtccagcacttccagccatggggctgggcgcctatgctgacagcaacaaccaggcagatgatcgcactatgcatacttcttcagtctctgtgaacgacgagcaaaaaggcgcggtgatcgccgatgagaagcgctggaacacccgcgcgctgatcgttgacgacgacgtgccgatccgcgaactgctgatcgattacctggcacgcttcaatattctcgccgtcggcgtgacggacggcgcggccatgcgcacggccatgcaggcggaaaccttcgatgtggtggtgctcgacctgatgttgccgggcgaagacggcctgtcgctgtgccgctggttgcgcggcgaatcggacatcccgatcctgatgctcaccgcccgctgcgaacccaccgaccgcatcatcggcctggaactgggcgccgacgactatatgtccaagccgttcgagccgcgcgagctggtagcccgcatccagacgatcctgcgccgggtgcgcgatgaccgcaccgagcagcgcgccaacatccgcttcgacaactggcgcctcaatagcgtgctgcgccaactggtcgccgacgatggcttggtggtgccgttgtccaacgccgaattccggctgttgtgggtgtttatcgagcgtccgcgccgcgtgttgagccgcgaacaactgctggatgccgcccgtggccgctccatcgaagcctttgatcgcagcatcgacctgctggtctcgcgcctgcgccagaaattgggggatgaccccaaggccccgcagctgatcaagaccgtacgaggcgaaggctacttgttcgacgcccgggatatcggctgatgcgcaacggcttcaatacgctgttcggaaggttgttcggcgtattgctgatcgccattgtgctggctcacgtgttggcgatcttctggtttcaccattacggcccgcaacccccgcctcccggtgaaatgtttgtgcagcaagcagacggcacgtttaccccactgcacaaaaaacacccgcgcccctggttcggcgggccggtggtgccgctgacctttcagttcatttcactgatcattgctgcctggtacggcgccaaactgctgagccggccgatccagcgcctgagcgcggcggcggaacgcttgagcgtcgacctcgacagcccgccgctcaatgagtccgggccccgggaggcgcgccaggccgcctcgactttcaacctgatgcaaaaacgcatccgcgagcaggtcagccagcgtgcacgcatgctcggcgcggtttcccatgacttgcgcaccccgttgtcgcgtctcaagctgcgcctggaacaaatcgaagacaccaagctgcaaggccagatgcgccaggacctcgacgacatgatcggcatgctcgacgccaccctcagctacctgcacgaacaacgcaccagcgagacccgacactggctcgacgtgcaggcgctggtggagtccttgagcgaaaacgcccaggaccagggctctgatgtgcagttttcgggcacctgcgcgcccttgcaggtgcagccgatggcattgcgctcatgccttaataacctgatcgacaatgccctgcgctatgccggcacggcgcgtgtggaactggctgacagccgtggcgccctggtgattcgcgtgatcgaccatggcccggggattgccgccgataagcgcgaagcggtattcgaaccgttctttcgcctggaaggctcacgcaatcgcaactccggcggcgtcggcctgggcatgacgatttccaaggaagccgtggaacgcctcggcggccacctcagcctggaagacaccccaggcggcggcttgaccgccgtgatgtggttgcccagaagctaatgggctggcacggccccttgtaggagctggcttgcctgcgatggcggtatgtcagtttgccaatgagcacctgacaggccgccatcgcaggcaagccagctcccacaatgatcgccatcgatcagctacatcggtttgtcttcgcggcgcacttgcgcctgggtggcgctccagtccgtcaacaggctgtaggccactgccagcaaggtcggccctataaacaggccgataaagccgaaagcgatcaacccgccgaacacccccaacagcacaatcaccagcggcaggttgccgccccggctgatcaggtagggtttgagcacgttgtccacgccgctgatgatgaacgtgccccacacccccaggaataccgcgtaggtgtaatcgcccttccacgccagccaggccgtggccggtatccacaccagcggcgggcccatggggatcaggctgagcaggaaggtgacaatgcccagcaccagcgcacccggcacaccggcgatcaggaagccgatcagcgccagcagggcctgggcggcggccgtgccgatcacgccattgaccacccgctgcacggtgcccgccaccagttcgatgtagtaaccggcacgatcgccgatcaggcgttccagcagacgatgcacaaaagtcgccaggcgtggcccgtcgcggtagaagaaaaacacgaacaccaggctcagggtcagctcaagaatgccgccgccgatttgcgcactgcgcgccagcagccagttaccgacctgccccaggtagggtttgatgctgaccatcagcgccgcgccttgctggtcgatgctgtcccacgtcgccaccagccgctcgcccacaaaggggatcgaccccagccaggtcggcgcggcaggcaagccgtccacctggatatccttgatcaggcccacggcatcgcgaacatgatcggccaggttgaaacccagccacaccaacggcaccgccaccagcaacatccagcccaaagtgaggatgcccgcagccagggattcgcggccgccgagccaacgtgtcaacaaacgcatcagcggccaactggcaaacgccagcaccgcgccccagaacagcgccgaccagaacggcgccatcacccagaagctcgcaccaaacagcaccagcagcaggatttgcaccagcaggcgatcgttattgagcatcgggtatctcgaaaagtaggctgtaggaagagagcttaggcgaacggcacgggtccgttcgccttgaggtgcctagcgtatcagatgcaggtgcaggcctttggcggcatcggtgccggtttccaggcgcgcggcacgcacaccgctgtcgatcaggccctggcgccaggcttcagcggtgggcccggtcaggctgacgcgcaacgtggcgtcgaggttcagcccacgggaaatcagggtcagccaggtggcgtccggttcagcgccgagtgcggggaagtccagctcgccggtgcttttcaactcacgcagcaaggtggccgaggtcggcaacagcgctcccagtggcgcgctggcatccagttgctctacatgcagataggcgcggcggttgccgcgggtgatgccgtacagcgccaccagggaattgtcctggggtgcggccaggcgcaacagcaagtattcctgctgaccgtcggcgcccaccagcttggcgttgccgaacacttcattggcccacaagctgctttcgccgcaatctcgcgcctggcaccagaacaacagttgcgcgcccttggcttgcaacgcttcgcgcgtcgcggtaaaggccgcgctggacgtatgctcgggcggcagttcataggtaatggcagtggcttggccccgcgcggtggcctggccttcgtagcgcaactggccgctgatcttgcggatcgcgcccatggggtagatgcgttctttttcttcagcggggcggtaatcgacgatctgtgcgtcgacctggcgggaaacggcgggtaaatcctgactgcccggcacgtcggcggcgaacaccaaggggctcaaacagcacagcccgaaggcacgtatacagcctttacgcaggctcatcggatgagtgagccctggccattggaggtcgcagcagtgttgaggtggttcatggttgactccctttcaatccgcccagcctcggcagttgaccccgccaagtcaaggcgtggagaagaaccgattgaaacagtctgcaacaagagctgcgccgggctcatcattcaggtgtaaatgatggccgcctggcagcgtggtcaccgtgaagggtagctgagaaagcaattcggaatgtttcgccagcatgccgtcagccgcgaccaccaattgcgtggggcaccctacgcgcttgacgaaagccatcgcctgctcatcggtcagacgcatcggcgacgccaatgtcaggcggctgtccgtacgccaggtatacccccccggcaccggcatcaaaccgcgctgggccagcagttcggcggcttcgcggctcacggccactacgcctttcatgcgtgcttctaccgcgcgatcgagggtgttgtagaccggtttctttttatcgcgcaggttcaattgcgcctgcaacgccatgccaagacgctcggcggcgttctcgccactggcggtcggcgggatcacgccgtcgattaaacctaggtgcgttatccgttccggcaaggcaccggccaacaccagggacacgatggcgccgagggagtggccaagtaatgcaaaacgtttccagcccagttgttcggccacctggagcacgtcagagacgtaatcccacaaggcgtaaccggcccccgccgggcgatgcgcggaatgcccgtgcccagccatgtccagggcaacaatgcgcaggcccgtcagtttaggcgccagccgcgcaaagctgttggcattgtccagccacccatgcagggcgatcaccggcaaaccgtcctcggggccaaacaaatgagccgccaactcgatgtgcggcaggctcaggcgcacttcctccaccggcgtactcatgcgcaatcgcgctcacgggcttcccagcgggagaacaggtttttgatcaaggtggcggtgtcctgcgggcgttcaaggggaaacatatggccgccgggcatggtgagcatttcgcccatgggcaggcggtcgacgccactggcatggtgacgcatcaccacacggctctggcggccccgcaccaccgccaacggcactttcaactgacgcacctggcccgggctggtgtgaggcacgccccggtagatgctgatttcggtggccgggtcaaaacgcaggcgcaagcggtcgcctacttgttgcaggccgtgttgcaggtaagcgtcaaagcattccgggtcgaacccgcgaaacagggttttgccggcaaagtagctgcgtgcgctggccaggtcggtgaactcttcacgacggcccagggtgcgcccggccggggtcaggcggtcgataaagccgaagcgtttggcggcgcggatcacccagcggtcggcgcgggtcagcacgggcgaatcgagcatcaccacgccacggtacagctgcgggcaacgcatggccgcgtgcaggtgcagcacgccacccagggaatggccaaccccccacaccggttccggctgttgctccaaatggtggatcagttcgtccaccaggttctgccagttgtcatccaccggaaacctggggtcgtgaccgtgctgcggcaagtgagccaccgcgtattccggggccagggcggcaaacaacttgccgtaggtggctgagggaaagccattggcgtgggcaaaaaacacgtgctgcgacataccggatccatcaacaaaaacagaagtggattgtcaccagctccgggcagctcagcaatgactgtaactgccaggaatgatgacactcacgccacgcctatcgcgccggcgggttctcgcccagcggcaccacggccatggtcaggcgcgacacgcaactggccttgccgtcatcactggtcaggcggatgtcccacacctgagtggtacgaccgatgtgaatcgcccgcgccatcgccgtgacccgcccgctgcgcacaccgcgcaggtggttggcgttgacctcaagccccacacaataaaacttgctggcatcgatgcacagataggcagccatggaaccgacactttcggccagcaccaccgacgcgccgccatgcaacaggccgtaaggctgatgggtacgatggtcgaccaccatgctggccgtcagggattcatcgtcgaagctttcgaagcggatatccagcaattcaccgatggtgtttttctggatggcgttgagttgctcgatattcggttgggtgcgccacaggctcatgcaagtgtccttattggttttattacgtccctaatcctgccacagaatggattcgctgcgctcgctccacgcgcgaaactctgcgccgtaggtcgactcgataatgttgcgcttgatcttcaaggtcggggtcaggaagccgttgtccaccgcccagctgtctttgaccaccaccagttggcgtaaacgctcatgtttatccagcgccccgttgacctgttccagcaggcgttcaaggctggtgcgcagcgcgtgccggtcttgctcacccgccgacagcacgcacagccccattggcgcagacaaaccatcgcccaccacacacacctgctcgatgcgcgggtgttcagccaatcggttttcaatcggcgcaggggcgacgtacttgcccttgctggtcttgaaaatttccttgaggcgcccggtcagacgcaagcggccgtcggcgtcctgctcgcctttgtcgccggtgcgcaaaaagccgtcatgggtgagggtttcggcggttttctgcgggtccttgaaatagccgagcatcgtcgcgccgctgcgcacctgtacttcgccgctggcatcaatgcgcacctcaacgccggggcatggcaagccgatccagccgagggtttgctggcccgggcggcacacgtgggaataaccgcaggcttcggtcatgccgtacacctccagcacgtcgagccccaggcgctggtaccaatgcagcaaggcttcaggcacgggcgcagcaccggacagtgcgatgcgcagttcgtccagccccagaccggcgaggactttatgccccacacgcttgccgataaaaggcaggcgcaacagcctgtccaagcgtttttccgggattttggcgtacacgcccatctgaaatttggtccagatccgtggcacaccaaacaacgcagtaggccgtgcccggcgcaagtcagccagaaacgtgtcgaggctctcggcaaaaaacacggtttgcccggtgtagatcgaagccagttccacgaacatccgctccgccacatggcacagcggcaggtaggacaaaaggcggtcgccctcccccaagccgaacagctcagtgccgcgcgtggcggcaaaacccagggcgccaaaggtttgcatcacgcctttgggcaaccccgttgtgccggaggtgtagacgatggtggccaggttcgaggcctcaggcgcggggttgtcctgaatcggtgaacaggcttgaaggtcggcccaggtgaaatcaaacgcccctgccgggcacagcggcaggccgatggtcggcatgccttgcgggatgcccgtcgccatggccgcccagtcgtccaacttgccgatcagcaccagcgccgcctcggagtgggtcaatacatgggccacggaatcagcggtgaggttggggtacagcggcaccgagacgtgcccggccatccagatcgccaggtcggcaatgatccagtgcgcagtgtttttcgcgatcagggcaatgtgcgagccctggggcaactcccgggcgcgcagccagtgtgcagcccggcgagcttgctggccgacgtcttcccaggtgagggtctgcacttcgccgccgccgatgggctgtacgaggaaaggtttgcgcgggtgccgcgcttcacgttcgaagaaaacctgcaacggcaaacgaaaagcgacgggcatgggacgcgctcctgtgtgatccgatgatagccaaccaagcacttgcttggttgactatatagcacacaaaaaagccgctatcgtgcctacggattcttcacactgaccaggctcatcagccccgccagcggaaagtcgccttcaagttccgccaggctggcggtgtgcatcggctgcggctggcgcagatggccatgctgcaaaaagctgatcaggctgcccaccaacggctggtggctgaccagtagcacattgtcgtcggtgtcgagtttatcgagcacctgaagcgggttgccttcgggcgtcagccaaggcaccgtgcggatttgcggttcgaaccccagcgcgtcgcgcaccaactgcgcggtttgctgcgcccgcacatacgggctggcgatgatggcggcgatgggctgcccgatcagatgcgcagcgctgcgcaacacttcgccacgcccatgttccgtcaggttgcgttcggcatcggtgcgcgcctgcccttcggcctcaccgtggcgcagtatccacagcttcacagttttggctcttcatcacgcaccgggtgcggtgccggcggcacgctgtgggcggcttcaccttcgggtgcacgcggggttggccaatcggcaaatggccagggtttctgatcactgtggaagctgccgaagcggccgatctgcgcgaggaactggctgaggctgtcgccgacattcatcaggcccaggttcggtgcgctgtagatcaggcgataaatcaactgcaccaccaccagtgcgccgagcaggaattgcgccacttgccacaccagggcaaacaccagcatccacagaatgcgcagcagaatggactcgtatttgggtgctgctttcggatcgttcatggcgcgttcctcagttgaaaccgctggtggaaataaagtcgacatcggttttcggctcggcgcgcatcagcagctcgatcacctggttcaaggtgcgcccttcaaacaggatcgcgtgcagcccggccaccagcggcatgtacacgcccacttcctgggccttggccttcagcactttaagcgtattcacgccttcggccacttcacccaggcgcgtgactgcatcgtccaggctcaagccctggcccaaggcgaaaccgacctggtaattgcggcttttcggcgacgagcaggtcacgatcaaatcgcctacgcccgccaaaccgaggaaggtcatcgggttggcaccctggttcaccgcaaagcgggtcatctcggccaacgcgcgagtgatcagcatgctcttggtgttttcgcccatgcccagtgccacggccatgccggcaatgatcgcatagacgtttttcaacgcaccgcccagctcaacgccgaaacggtcgccactggcatacacacggaatgtgcggccatgcagcactgcctggacgcgttcgcaaagcgcttcatcttcactggcaaccacggtggccgtcagcgcgtgctcggccacttcccgcgccaggttcggcccggacaacacgccgatgcgcgcctgcggagcgatctcttcaaggatttcgctcatcagcttgaaggtctgcgcctcgatacctttggtcaggctgaccagcagcttgcccgccaggcgttcggcgtggggcgccagcaccgagcgcaaggcgctggaaggcagtgccacgaaacacaagtcgcaggcggtgagggtttcgagcaaatcggtgaccggctcgaccgccgggtgaattttgatgcctttgaggtagcgcgggttttcccggtggacgcgaatggcctcggcctgttcgggatcacgcatccactggcgcaccgcgtggccgttctcggccagcaggttagccacggcggtaccaaaacttccgcctcccaggaccgcaatcgggcgctgttcagtcatatgcaatccgttaatccataccagtggcgatggcggcattatacggggcgacccgcttgcggccagcccccgtgtcaattcatacgtttgtcggaaaatgcgacagttgtgtgaagtaatagccagtacgacgactggcaaatggccggtcctcagttaacatgggcggctatccgtaattatcaaggccgtgccgtgtatctgggccctcctccccgttcatccctattgttgatgctgttaggcatgccgttgtgcagtagccctgcgctggctgatgatttgttcctcgacagccagccgctgccgcaagtgctgaccgccacgcgcctcaaacaatcggccgccgccgtgcccggcagcatgacggtgatcgacagcgaactgatcaaggccagcggcgcgcgggatatcgccgaactgttgcggctggtaccggggatgatggtcggctacaccaccggcaaccaggcggcagtcaattaccacggtaccagcgccagcgacgcacggcgcatgcaggtgttgatcgatgggcggtcggtgtaccgcgcaggcctggcgaccgtggactggagcgacattccggtggccatggaagatatcgagcggatcgaagtgttccgtggccccaacaccgtcagctacggcgccaatgcgctgatggcggtggtcaatatccttacgcgctcacccgccaacagccagggctcgcgggtgaaggtcatccgtggcgcgcgcgggatcaacgatttctacgccagccagggcgtgggctgggagaccggtgacttgcgcctgtccctgtccggacaacaggacgacgggtttgacagcgacgccgccggcgccgaccgccgggacagtcggcgcctcagccgattcagcctggcggtgagccagatcctgaacgcagaacagagtctcgactggcagttcgatgccaaggaaggcagcaatcagcggccttatacctacaccccggtatttgccgggattaccgaaggcggtactaattccgacgtgacggcgaaggactatgcaggctcggtgcgctggaactacgagttcaacccggaacacagcctgtatatccagggttcggcccagcaatgggaccgccagcaagtctggaaggcgtgtgatgccaaggtgtcgttcagcccggagctgacccagttgtggcagatcaaccccaactatgccgaacaattggcccggcacatggacacctacagccaaggcaccgcgccgcctggcaccgctgccgagcaagcactgggcaaccaagtgctggatcagtggcgcaatggggccaaccagagcgtgtgcggcgatatcgaccagagcacccgcgaaagccgctacgacatcgagattcaggacaccctcagcctgtccgacagcctgcgcctggtcagcggcatgaattatcgctacgaccgcgccgactccgacacttacttcaacggcacactcgacgacaccacttggcgcctgttcggccacctggagtggcgcgccagcgagcactggctgctgcaaggcggtgcgatgtatgaagacacgcacctgagcggcaactcgctgacaccacgggtggccgtcaactatttgatcaacccgcgccacggtctgcgcgcggtgtactccgaggcgattcgctcgccggacatgtttgagaacaacgtcaactggagctatcgcgtcaccaacctcagctcgccagcctatgggcagaactccgggcaatattttgtggtaacgcgcggccccggcaacctcgataaagagttgatgcgctcgcgagagctgggctacaacggcttctttgccgacctcggattgaatgtcgacgtgaaactgttctatgacgaaatcaccgacatgatcagttcgccgctgcgcaataaccaatacattgccagcaacgccaacagctcgcgcttcaccggggccgagtcgcaattcgactggcgcatgagcaacgccgaccgcttgcggctgacctatgcttacgtcgacgccaccgccagcaaccccagggacaaagcgcaaaccgcgcgcaacagcggctccgccggctggttgcgtgagtggggccagggctggtccagcgcgctgttctactatggtgacgacgcactcaatcagtatcgcttcgaacgggtcgacctgcgggtggccaagcgcattgccttgggcaaagccaacgtggagctggccggcatgctgcaacaacgcctcgataaccagcccaccacctgggccgacaacaattacgacagtcgccatgtcctctatttcagcgcggagctggaattctgatatgggcgatcagtcacggatgaccctccattacctttcacgcttctggcggcgcggcctgttactggtgtgcctgctgctgacggcgcccgcgtggagcgccgacatcctgctgaccgctgccgaagacggtgccggcgtgcaagccttcgcccaggccctggcccggcaacgcccgcaggaccacgtcaccttcaccccgctcaaagacctgcccgccccgagccaactgccggccagcacccgcctgatcctgctggacctgcccggcctcgactggcggctgcaagataaccagggcccgccaaccctggtgctgcgtatcagccgcttgcaagcccgccagcgcctgggtaatgcgcacccggcaaaaatcagcctgttgtggagcgacccgccgctggagcgccaactgaacctgatcgtcggcattgtgcctcaggctcgccggatcggtgttctctacggcactgacagcgaattcctgctgcgtgagttgacccaatatgccgcgcctttggggctcgagatcgtgccgcagctgtgggacaacaccaatgacagccgcccgctgcagaacctgttcaagaacagtgacgtactgctcggcctcgatgacccgcaactgtacaacccgaaaaccgtgaagaacctgttgctcagcagctatgcccagcagttgccgctggtgggacccaatgccgggttcgtcaaggccggcgccctggccagcacctacagcgaccaggcggactggctggatgtactcgaccgcctgctggaccattcgccggccagttggccacgcaccttgtacccggaacacttcaaagtcgtgggcaacccgcaagtcgcgcgctcactgggaatcgaacaggtggacgaagccgccgtcgccgcccgattggctgaaggagagaaacgcccatgaccttgcgtcgtcgttgggacatcaacacccgcacccagctcattaccctgggcccggcgctgttgctgacgttgctgttgatcagcttctttaccttcgtgcgcattcaggacctgcgccaggaactggaccacaccggccaactgatcgccaaccagctcgcacccgccaccgaatacggcgtgatttccggcaacaacgacgtgctcgagagcctgctgcgcgccaccttggccaccccgcatgtacgtttcctggagattcaggacagcgccgaaaacattctggtgtacgtcgagcagccctcggagaagcatgaccgctcgttatcggtgaaagtcttccaggcgccgatccgcttgcagcatatccagctgggcaccgattttttccaggacaacctcaacgaacccaaggcgccgcgtgcggactacctgggccgggtgatcgtcggcatgtccaacgacgccttcagccaacgccaacaggaaatcctcttcaaggccggcatcctcgccctcttcgccctgctgtttacctttctgctggcgcggcgcctggccgccagcctgtcgcagccgatcagtgccatgggccacgcggtaaaagccatccagcagggcgactacaaaacaccgctgccgattgtcgatgactctgaactgggcgacctgtcgcggcatatcaacaacctcgccgaaggcctcaaccaggccagccgtgaacaacagcaagccatggcccaattgatccagacgcgcgaggaagccgaacgggcgaacaatgcgaagtcggacttcctggcaatgatgagccacgaactgcgcacgcccatgaacggcgtgctgggcatgttgcagttgctggaaaccaccgaaatgaccgaggagcagaccgagtacgccgcactggcctcggagtccaccgagcacctgctcaaagtgatcaatgacattctcgacttctcgcgtatcgaacgcgccgcgctggagctggaacatatttcgttcaacctggcggacctgatcagcagttgcgcccaagcctttcaacacagcgcccagcaacgcggcctggtgctggaactgccaatcccactgggcatggacgccttgcgggtgcagggcgacccgacgcgtatccggcagattctggtgaacctgatcggcaacgcgctcaaattcactgagcacggcaccgtcactgtcgagccccattggcaaaccctggaccatgagctggtgtggttcacctgcaccgtaagcgacagcggcatcggcatttccgccgagcgcctggagctgatgttcgacgcgttccagcaggccgacagttccatttcaagacgttacggcggcaccggcctgggcctgcccattgcccgcacgctggccgaacgcatggggggcaccctgcgcgcccaaagcgaagaaggccgtggctcggtgttcaccctggaaatcccgttggccattgaccagcaaagcctgccggcgattgcgctggacgccgaaggcaaaaccggcgcgggtgatggccgccacgtattgctggtggaggacaacccggtcaaccgcacggtggtcgaagccatgctgcgcagcctggggtttgaagtgagcctggccaccgacggcgccgaagccatccgcagcgccgaaagcctgattttcacggcgatcctgatggactgccgcttgccgttgatcgacggctatgaagccacccgacagattcgccaactgcccggctgcgccgatctgccgatcattgcgctgacggccaacgccttgcagggcgaccgtgaagcctgcctggcagccggaatgaacgattacctggccaagccgttcaaacgtacggatttgcaacaaatactgcagcgctgggtgcaatagcgccgcgccatcaaccaactgcgactggcgtgaaagacgaaagtgcggcagtcttaggcacccgaacggacctataaacaggcccggtttaaaatttcagtgaacaagtgtacattcagtgccttgacgctgtgactttcactacaacgcaatagtctacgtgtaggctgctgacctgaggcatgaacgcttcagtcggttgggaagatttgccctgccccgccgcatgggattattgaggagctcgcatgaccaaacaaaacgcctttactcgggaagacctgctgcgctgcagtcgcggtgagctgttcggcccaggtaacgcgcaactgcccgccccgaacatgctgatggtggatcgcatcacccatatcagcgaagagggtggcaagtacggcaaaggtgaattggtcgccgagctggatatcacccctgacctgtggttcttcgcctgccatttcgaaggcgaccccgtaatgccgggctgcctgggcctcgacgccatgtggcaactggtcggcttctacctgggctggcaaggcctgccgggtcgtggccgcgccctgggttcgggcgaagtgaaattctttggccaggtcctgccgaccgccaagaaagtcacctacaacattcaaatcaagcgcgtcctcaagggcaagctgaacctggccatcgccgacggttcggtcactgtcgacggtcgcgagatctatactgccgaaggccttcgggtcggcgtattcacttccactgacaacttttaagggttatccgcatgcgccgcgtcgttatcactggtctgggcatcgtttcttgcctgggcaatgacaaagagaccgtcaccgctaacctgcgtgcaagtcgccctggcatccgcttcaacccggaatatgccgaaatgggtctgcgtagccaggtttccggctccatcgacctgcccctcgaagaactgatagatcgcaagatctaccgcttcgtcggccacgctgccgcctacgcctacctggccatgaaagacgcgatcgccgactccggcctgagcgaagaccaggtatcgaacgtacgcaccggcctgatcgccggctcgggcggcgcatcgaccctgaaccagatggaagcgctggacatcctgcgcgaaaaaggcgtgaagcgcgtcggcccgtaccgtgtaacccggaccatgggcagcaccgtttccgcctgcctggccacgccgttccagatcaagggcgtgaactactcgatctcctcggcttgcgccaccagtgctcactgcatcggtactgccgttgagcagatccagctgggcaagcaggacatcgtcttcgccggcggcggtgaagaagaacactggagccaatcgttcctgttcgatgccatgggcgcgctgtccacccagtacaacgaaaccccggaaaaggcctcccgcgcctacgacgccaagcgtgacggtttcgtcatcgccggcggtggcggcatggtggtggtcgaggagctggaacacgctctggcccgtggcgcgaagatctacgcggaaatcgtcggctacggcgccacttccgatggctacgacatggttgcgccaagcggcgaaggcgccatccgctgcatgcagatggccatgtccaccgtggataccccaatcgactacctgaacacccacggcacttcgactccggtcggtgacgccaaggaaatggaaggtgtgcgtgcggtcttcggcgacaaggcgccggccatcagctccaccaagagcctgtcgggccactccctgggcgccgccggcgttcacgaagcgatctactgcctgctgatgatggaaggcaacttcatggccggttcggccaacatcgacgaaattgatccggttgtggctgatatgccgatcctgaccaagaccgttgagaacgcaaaaatcgacaccgtgatgagcaacagcttcggctttggtggcaccaacgccaccctggtgctgaaacgctggcagggtcagtaagacctgtaggttgatcacctgaaaaagccccgactggttcggggcttttttgtgggcaactggatgagaccgagccgctttcatcgcaggcaagccagctcccacacttgaccgagtacatctgtgggagctggcttgcctgcgatagcgccacctcggcctatcgccctacaccgaaaaccgcgccaccatggtgttcaaatccaccgccaaccgagacagttcctggctcgccgcactggtctggttcgccccggtcgacgtctgatgcgccaaatcgcggatattcatcaaattgcgatccacctcccgcgccaccgccgcctgttgctccgaggcactggcaatcaccaggttgcgctcattgatcagcgtaaacgccgacgcaatttcctccagcgccatacccgctgacttggcgatatccagcgtggagcgcgcgcggctgttgctcagttgcatcgaactgacggcctggtccgtgccctgctgaatcccgctgatcatcacctcgatttcctgggttgactgctgtgtacgatgagccagcgcgcgcacctcatccgccaccaccgcaaacccacgcccggcatctccggcccgcgcagcttcaatcgccgcgttcagcgccagcaagttggtttgctcggcaatcgagcgaatcacgtccagcaccttgctgatgccatacaccttctgcgccaaatcctcgacctgggccgcattggccgtgacatcggtggccagcgcctcaatcgactctacggtctggtgcacctgctcacgcccctgctgggcaatccggtcagactcacgcgatgcctgggaggtggccaccgcattgctcgccacctcctccactgccgccgtcatctggttgaccgccgtggcggcctgttcgatttcctggttctgctggtgcaggccgcgcgtggcatcctcggtgacgcaactgagctcttctgaagccgaggccaactggttcgaggattcggcaatccgccggatcgtgtcgcgcaggttctcctgcatatctttgagcgcccgctgtaaacgcgccggctcatcattgccggacactctaatctcgccggtcaggtcgccactggccacgccttgggcgactttcagtgactgcgccagcggcagcacgatactgcgcgtcaaccacagcgccagaccgacagtgatcaacgccgtgagtacaatcatgccgaccacccaggtacgcgactgcgtgaatacgctttgcgccaggttcgccgcatggttggcattggttttgttcagttctacaagatcatgcagggtgcccgccatctcgtcggcgagctgattcatttcgccgttgaccaccctcaccgcctcttccagctggttggccctggaaaagcccatgacctgttcctggcgttgcaggtattgctgctcctgagccttgaaacgatcaaacagcgcacgctcttcgggcagcacgatcagcgcctcgtaaagcgcttgcgccttgtgcaggccgcttttgagtgcggtgagtttctgctcgttttgtgccagtgcctgtgggtcgcggttgaccagcaggcgcaaggtcagcgcgcgcacccgcagcaggtcctggctcatctcccccaccgccatcacgctgggcaaccagttgttttccacctggtccgactgctggcgcatattggccatctgcagcagggcaaagccgcccagggcgaacaccatcaacgccagcacgccaaagcccaaaccggcgcgcggggcaatattcaaactgcggatactcatgcccggattcctttcatgtgcgctgcatccacctgcagcaggtctcatcaacggtatcggcccttgttcttgtttgcgtaagacgaaaacgcgatatcaatacgcagtgcaatcgcgacggcatcggatggagaaatacggaacacccaagtgccagcatgctctataacttcatgatcctttctcctgccgccctgtgaggttcaccatgcctgttaccgtcaataccctgaaccacgacaactttcgccacagcgtgaatatcaataaccacgagctgttcaccgacctgcccaagagcctgggcggcgacgactcggcgccctcccctcatgactatttcgatgccgccctggcgtcgtgcaaggccctgaccgtcaagctctacgcccagaagaaagacatccccctcaccggcgtcaccgtggaagtcacccacgacagctctgaggagcaaaagggcaaatacaggctcaacgtcaagctgaccctcaagggcgtgctcaccgatgagcagcgtgaggaactgcaccgcgtggccgatcgctgcccggtgcacaagctgatgaccactgccgaagtcaccatcgaaaccaaattgtcggaaggcgctttcagccaatagcacccactgcctgtcgggcgggttatgctcagtcacatctaacccgctcagacagggatgcccatgaccaccgtgatccgcccccgcgccgaagatgtcgaaggccaacccatcctgcgcccgctgccctcgcgcgaatgccgcagcgttgggccttttgtctttttcgaccacatgttgctcacccgctatgcgccgggggcaggcatgaatatccgccagcacccgcatatcgggctgtctacgctgacgtacctgtttgaaggcgcgttgcaacacaaagacagcctcggttcggaccaggtggtagaggctggtgatgtgagctggatgaccgccggcagcgcgattgcccacgtcgaacgcacacccgaggcgctcaaggcccgcgggttcagcctgcacgggctgcaagtgtggctcgcgtcacccagggatcacgaaaccgggccagggcattacagccatcacccggcggcgagcctgccggtgagcgacaacctgggtgtgcaaattcgcctgatcgcaggcaacgggttttgcctcaagtcgccggtgcctgtgctgtcgcccacgctgtacgccgaggtgcggatgcagacggctactaccttgctggtcccggatgaacacgaggaacgggcggtgtatgtgctggaaggcgaggcacagctcgatggcgaagcgctggaggtgcacagcctggtggtattgccggccggtcaggaaatgacgctgttcgccgagagcgattgccatttggtgatattcggtggcgccccgctggatggaccgcgacgaatcaactggaattttgtggcgagtgatccggcggtgattgaacaggccaggcagcgctgggcggccggggattggccgacggtgccgggtgaatcagaaaggattgagttgccggtgagatagctatcgcgggcaagcccgctcccacacttgaatgcattcaccattcaaactgtgggagctggcttgcctgcgatggggccatcagcccttgaacacttcatccagcaaatcatgcatcgacttgaacgcccgcgtggcggtcttcgcgtcgtacatcatcttgcccggcacattcgcgtgcgggtcggtgaaggaatgcaccgcgccaccgtagctcagcaattgccaatccacaccggcagcgttcatttcagcttcgaacgccggcagttgctctttcggcaccagagggtcggatgcaccgtgcaacaccagcacagagcccttgacgtgcttcgcacctgccgggttctgtgtgtcgatggtgccgtggaacgatacggcagctttcagcggcgcaccggtacgcgccagctccagcgagcagaaaccgccaaagcagaaaccgaaggtcgccagcttcgaggtatcgacctcggcttgaccctgcagttgttcaaacgccgcctgcaacagtttgagcagcttggcgttgtcattcttcaacggcatcatcgccgcgccggcttcatcgccattggacgggcgcacagtctgcccgtacaggtcggcgatcaacaccacgtagcctttgccggccacgctcttggcaatctcttcggcacccgcactcacgcccatccagttcggcgccatcagcagacccggcagcgggcctttgtggctggcatcgaacgcgaggcggctttcataagactggccatcaatctgatagaccacggaacgcacagtgacttggctcatcatttactccagttgaggtgcacgagaacgaaaaaacccgccgaagcgggtttttctacaacggtgtcagaccgacagttcaaccaacagcttgttcagtcggcgcacgtaggcggccgggtctttcaggctgtcgccagcggccagggccgcctggtcgaagaggatgtgcgacaggtcgccaaaccgctcttcgctctgctcgccgtcgagtttttcgatcagcgggtgagccgggttgaattcgaagatcggcttggaatccggaaccttctgaccgctggcctcgaggatctggcgcatctgcatgcccaggtccgcttcgccgatagccaaaatcgccggggaatcggtcagacggtgggaaacccgcacttcgctgacagcctcgcccagggatgccttgatgcgctcaaccaaaccttctttggccttggcgacttcttcggcttccttcttctcttcctcggagtccaggttacccaggtccaggtcaccacgggccacgtcgacgaaggatttgccgtcgaactcgttgaggtagctcatcagccactcatcgatacggtcggtcagcagcagcacttcgatgcctttcttgcggaagacttccaagtgcgggctgttcttgacctgggcgtaggtttcgccggtcaggtagtaaatcttgtcctgaccttccttggcgcgtgccaggtactcggccagggacaccacctgctcgccgccctcttcatgggtggaagcaaagcgcaacagaccggcgattttttccttgttggcgaaatcttcagccgggccttctttcatgacctggccgaagtttttccagaagcccttgtattgctcaggctcgttcttcgccagtttttccagcatgtcgagcacgcgcttggtcagcgccgacttcatggaatcaatgatcgggtctttctgcaggatttcccgcgacacgttcagcgacaaatcgttggaatcgaccacacccttgatgaagcgcaggtacagcggcaggaaggattctgcctggtccatcacgaacacgcgctgcacgtaaagcttcaggcctttcggcgcttcacgctggtacaggtcgaacggcgcacgggccggtacgtagagcagcgagctgtattccagcttgccttcgaccttgttgtggctccagctcagcgggttctcgtagtcgtgaccgatgtgcttgtagaactcctggtattcctcgtccttgatttcggtacgcggacgagtccacagcgcgctggcacggttgacggtttcccattccggcgcaggctgctcttcgccttcggcagcggcctgctctttaggcagctcgatcggcagagcgatgtggtcggagtacttcttgatgatgttacgcaggcggtagccgtcagcgaactcatcttctgcggatttgaggtgcagcacgatacgggtgccacggtcagccttgtcgatggtggcgatttcgaattcgccctcacccttggacgaccagtgcacaccttcgctggcggcgaggccggcacggcggctgaatacttccactttgtcggccacgataaaggccgagtagaagcccacgccgaactggccgatcaggtgcgagtcttttttctgatcgcccgacaggttcttcatgaaatctgcggtgccggatttggcgatggtacccaagtgggtaatcgcgtcttcgcggctcatgccgatgccgttgtcttcgagggtgacggtcttggcgtccttgtcgaagctcacacggattttcagttcggcgccaccttccagcaactcgggcttggacagggcttcgaaacgtaatttatcgacagcgtcagaggcgttcgagatcaattcgcgaaggaaaatttccttgttggaatacagcgaatggatcatgaggtgcagcagttgcttcacctcggtctggaagcccagggtttccttttgagtttccacactcatggtcatcaaactccaattggatggcagtggccgcgcccttaagggttggcggcgggttgtcatcaaagttgggggctaagacagggatttcaagggcgcgccaattcctcaatcttgaaatgtgcgcgggcggtggcaatcggctcggccggggtgctctgccaggcggtgatcgccacattcgcgacgcgccggccctggcgccacacctggcacgtggcgtaggtgtcgcgaaactgcccggcacgcaggtaatccagggaaaaatcgatgattttcggaatgccgggggcccccgtaaaaaccagcaggtgcagcgctgccgacacctccatgaaccctgcaatcaccccgccgtggagcgccggcaaaattgggttaccaatgttgtccttgttggccggcatcctgaacagcaattcgtcgcccagccgggtgcattcaatgccgatcagtttggcgtaggggataaggtccagcagggctgtgtaatcaccgcgcgcgtgggcttgttcgaggcgggttttgaatcggtgcgtcatgcccggtctcccttgatggtgttgcccagcccctgcgtgcctttgagccgcttgcccatgcgcatgaacgtgccgactacgtgagcaatcgtctgctgcgggtcgtcctggtaggcaaagccacgggtgaagatcacgtcagtggtcacgcgatagcattgggcgaaaccgtagaccggtttatgcggctccgcggcatgcatgtagtcgacgcgcaggtcgagggtcgggcacacctcgaattccggtaacacgcacagggtggccataccgcaggcggtgtccatcagggaggtcaacgcgccgccatgaatgacgccggtttgcggatctccgacgatggattcgccatacggtagaagcagcgtcatgccctcctcgctcgccgcatgcacggaaatgcccaacacctggcaatggcgcaaggctgaaacgaagcgtgtggcacgctctaacaaggggttttcggtcattgtttgcagactcttattagtgtgatttcggctgaaagtggcgaccgaggaaagttccttttcaaaaacctttatatatctgttggataaaaggaactaatgctggcccctcaagctcgaaaggccagtagatatatccataaggagaaacaccccatgcgcaagactctcgctatttccatgatgctggccgctgccctcggtctcgctgcctgcgataaaaaatccgaagacaaagcccaagacgccgctgcacattccgagcaagctcagaaagacatggcgaaggctcaggataaagtgaacgacgctgcgaaagaaaacgccgatgctgccaaagctcaggctgaatcgaacgaagccgccgcgaaagaagcagcacctgccgctccagcagaaccagccaagaactaatcagctggctggcgctgcaaaaagaaagcccgcttacatagcgggcttttctttgcctgctgttttgtcaggcaaacaagttggactaaccctggcgcgccttaatcaagtcacggcctctttaggcgcttccgggctgtcagtcggtgtgtaaaccatcacctgcagtacgtcggaatgaaactcccgacgatacagaaccaacaccacagcactactcatcaacatgaataaccatgggctgacgaaccaggccagcatggtcatgccgaagtaataagaacgcaggccaaagttgaattgattggccgccatcgaaatcacgcgcgctgcccgcagtgcgaatgccttgcgctcctgctccgacacctgccgctccccgatcatcggcgccgagcccaccagcaccgccgcaaaattgtattggcgcatgcaccagctgaaagtaaaaaacgcgtagacgaacaccagcgcgaggcacagcagtttgatctccgacatgccctgagaggcctgctgcaccagcggaatgtccgccagcaacgacacagcccgctccgaagcgccgagcacggtgagaatgcccgcaaggataatcaaggtgctggacgcaaagaacgaggcgttgcgctccaggttgccgatcacgctggcgtcggcaatacggttgtcacgcagcagcatgcggcgcatccagtcttcacggtacaggtgcagcacactggccaggcacgcggtatcacgggctttccaggtggcgtaacgggtatagccgccccagcacagggcaaaccagaatgcggcgagcaggtggatctggttggtttcgatgaacgacatgcgggtccttgggaaggaggataaaggtaaacacgatccaaaaatgtgggagctggcttgcctgcgattgcagtagttcagacgactcggcagtgactgcacagacgctatcgcaggcaagccagctcccacactgaccgagttccaactgtagaacgtatagtctcgcagacataaaaaatgccccgtatcgattgatacggggcatttcggtacagcgcgaaaaccgtgttacgcgatggcttcgctgcgcttgccgagcatgcggtcaaccaccaccgccgcaaccaacgtcatcaccgacggcaccagccacgccaggccctgctcgctcagcggcaagtgtgccaactgcgaaggcatccagtctgcgagccctgcgcccttgagcgcgtcgatgcagccgaaaatgaacgacaccagcatcaccgggccgacgatgcggccctgctcctgccagaagtctttgcagaagctcagggcgaccagcacgatgcacggcgggtagatagcggtcagaaccgggatcgagaacgcgatcagcttggtcagcccgaggttggacacgaacaacgagaacaacgccaggatgaccaccagcgtcttgtaggacagtggcaggattcggctgaaatactcggcgcaggcacaggtcaggcctacggcagtgaccaggcacgccagggagatcagcacagccaggaaaccgctgcccaacgaaccaaaggtgtgttgcacataagcgtgcagcaccgcagcgccgttgctggcgccggcggccaccgcgtggctgcccgagcccaggcggaacaggctgacatacaccagcgccaggcccacaccggcaatcagcccggcaatgatggcgtagcgggtgatcagcttcggcgattcaaccccacgggaacgaatggcgttgacgatcacgatgccgaacaccagcgcgcccagggtatccatggtcaggtaaccattgataaacccttgggagaacggcgcagcgacgtattccggggtggcaacccccacttcaccggctggcaaggcaaaagcagcgatgccgagaatggccagcgcgatgatcttcagcggtgccaggaaacgaccgacggtgtcgagcagccggcccgggtacagggagacaaagaacaccaccaggaagtacaccgagctgtagaggaacagcgccagcgggctttcgccggtcagcggcgccaagcccacttcaaacgaaacggtcgcggtacgcggggtggcgaacagcggccctaccgccaggtacgccgccgccgcgagcaggccgccggcgatcttgccgatcgggctgctcaacgcgtccatgccgccaccgaccttggccagtgcgatcacggtgaccaccggtaaacccactgcggtgatcaggaaacccagcgcagccatccagacatgaggcccggactgcaaaccaacgatgggcgggaagatgatgttgccggcgccaacaaacagcgcaaaagtcataaagcccagcgccaggatgtcctggcttttcaacactttcatttgaggaaataccacactgctgaatcggaatttagagagggcttccctatggatgagggaaatgctgccggcccttatgggagccggccggtctagcgcggggcttccttttgggatgcgcacgcataaagaggcggacagggtacagaaataggctgacaaacgcactgttgcggggcgaactgtccgataagcgacattcctatgtcgcgttttcatacttaatttggcaatccaatccaatgtgggagctggcttgcctgcgatgctgccacctcggtcttccatttacaccgcggtgatgccatcgcaggcaagccagctcccacattgaaccgagtacccttacgaaaatgggtatacccagaatgcacaaaggccacccgaaggtggcctttgtgttggtaaagcgtcagctaagcgcgaggcttatttgacagcccaaccggtcagctcggacaaagccttgccgatgtctgccagcgaacgcacggttttaacgcctgcgtcttccagggcagcaaacttctcgtctgcagtgcccttgccgccagagatgattgcgccagcatggcccatgcgcttgccagcaggggcagtcacaccagcgatgtaggaaacaactggcttggtcacgtgtgccttgatgtaggcagccgcttcttcttcagccgaaccgccgatctcaccgatcatgacgatcgcttcggtcttcgggtcttcctggaacagcttcaggatgtcgatgaagttcgaacccgggatcgggtcaccaccgatgccgacgcaagtcgactgaccgaaaccggcgtcagtagtctgcttaacagcttcgtaggtcagggtgccggaacgggaaacgataccgactttgcctggcaagtgaatgtgacctggcatgatgccgatcttgcattcgcctggggtgatcacgcctgggcagttagggccgatcagggtaacacccagctcgtcgcacttaactttagcgtccagcatgtccagggtaggaatgccttcggtgatgcagacgatcagcttgatgccgccgaaggctgcttccaggatcgagtccttgcagaaaggagctggaacgtagatcacgctggcggtggcgccagtggcagctacagcatctttcacggtgttgaacactggcaggcccaggtgctcggtgccgcctttgcctggagttacgccgccaaccatcttggtgccgtattcgatggcttgctgggtgtggaaactaccttgcgaaccggtaataccctggcagataactttggtgtctttattgatcaggacgctcattatttgccctccgcagctttgacaacttgttgagcagcgtcggtcaggctggtagccgcgatgatgttcaaaccgctttctgccagtactttagcgcccagttcagcattgttaccttcaaggcgaacaacaaccgggattttaacgccaacttctttcactgcaccgatgatgccttcggcaatcatgtcgcaacgaacgatgccgccgaagatgttgaccagtactgcagcgacgttggagtcggacaggatgatcttgaatgcttcggtaacgcgttctttggtagcaccgccgcctacgtcgaggaagttggctggtttgccgccatgcaggttgacgatgtccatggtacccatggccaggccggcaccgttgaccatgcaaccgatgttgccttccagggctacgtagttcagttcgaacttggcagcgtgcgcttcgcgcggatcgtcttgcgacggatcgtggaaagtcttcagcttaggctgacggtacatggcgttggcgtcgatgttgatcttggcgtccaggcagtgcagatcgccgtcagccttgatcaccagcgggttcacttccagcagggccagatcgtgatcctggaacagtttcgccagacctacgaagatcttggcgaactgggcaacttgcttgccttccaggcccagctggaaagccagctcgcgaccctggaatggctgagcgccaaccagtggatcgatggtggctttcagaattttttctggggtttcttcggcgatcttctcaatgtccacgccaccttcggtggaagccatgaacacgatgcgacggctcgaacggtcaacgacagcgcccaggtacagctctttagcgatatcagtgcacgattcaaccaggatcttggtgactggttggccattggcatcagtctggtaagtcaccagacgcttgcccagccactgctgtgcgaaggccttggcgtcttctttgctgcgaaccagcttaacgccgcccgctttaccgcgaccaccagcgtggacctgggctttgacaacccactcggtgccgccgattttgtcgcaagcttctgctgctgcttccggggtgtctactgcgtagcccttggaaactggcaggccgtattcagcgaacagctgcttaccctgatactcgtgaagattcatgctttttaccgtcttcgttaggtactgcgcattcggcgctgcgctcgttatgagtgccgcgccacctgtgactgctgctcgcgcaacttgcgaggcttaatgcccgtaaagctgcgcaaggctgcgtccggcggatattccgcggtgagtcttgcgcgcaaggctcacgacgggcaactccgccgtggtttcttattatcttgcttagcgcttcttgcggttggcgatgtggatggcgccgccattcactgccaacgctgcttcgtgcaacgcttcggacagggtcggatgggagaagaccatcatgcccaggtcttcggcactggtgccgaattccataccgatcgcgccttgctgaaccagttctgcagcgctcgggccaatcacgtggacgcccaatacgcggtcagtcttggcatcagcgatgactttgacaaaaccaccggtgtcgttggctgccatggcacggccagaagcggcgaacgggaaggtgccgacgttaacttcaacgccttcagctttcaactgctgttcgttcttgccgacccatgcaatttccgggtgggtgtagataaccgatgggatcaggtcgtagttcatctgggttttgtggcccttgatgcgctcgacaaccatgatgccttcttcggaagccttgtgcgccagcatcatgccgcgaaccacgtcgccgatggcgtatacgccaggcacggtggtcgcgcagtgatcgtcaacgtgcacatagccgcgctcgtcgagggtcacaccactgtcggaagccagcaggtcggtagtcactggacggcgaccaacagctacgatcagcttgtcgaaagtgatggttttttcgccatccttgtcggtgtagttaacaacgacttcttcgccattcactttggagccggttacgcgagcgcccagcttgatgtccagaccttgtttggtcagggttttcaaggcttctttggacacggcggtgtcggcagccagcaggaacgtgtccagggcttccagaacagttacttcagcacccagacgggaccataccgaacccagttccaggccgatcacgccagcgccgatcacgcccagacgttttggaaccgattggaattccagggcgccggtcgaatcaacgatgacgttgttgtcgactggagcaggcggaatgtcgattgggcgcgaacctggcgccaggatcacgttttcagcttcgatgacttcaaccgaaccgtctggcttggtgatttcgatcttcttgccggccagcagtttgccgtggccttgcagggaagtcacaccgttggccttgaacaaggtcgcaacgccggacgtcaggcccttaacgatgttggctttacggccgaccattgctggaacgtccatggtcacgccagcatggttgatgccgtggatcgcgaagccgtcttgggcttcgtggaatttccaggagctgtccagcagcgccttggaaggaatgcaaccgacgttcaggcaagtaccgcccagtgccagtttgccttccttgtcggtgtatttttcgatgcaagcagtcgagaggcccagttgtgcggccttgatggcggcaacgtagccgccaggacctgcaccaatcactacaacgtcaaatttctgcgacatgaaaatagttcctctatttagcagcaagctttcaagccgcaagcccagggccaagctgccgtatccggcagtgtgccccagggcctgcagctgcttctatcagatatccagcagcagacgagccgggtcttccagcaggttcttgatggtcaccaggaaagtcacggcttctttaccatcgatcaggcggtgatcgtaagacagtgccaggtacatcatcgggcggataacgacttggccgttgatggccatcggacgctggatgatgttgtgcatgcccaggatcgcagcttgcggcgggttgacgatcggcgtcgacatcatcgaaccgaaggtaccaccgttggtgatggtgaaggtaccgccggtcatctcgtcgatggtcagcttgccgtcacgggctttcttgccgaagccggcgatgccgccttcgatttcagccaggctcatcagctcggcgttacgcagaaccggtaccaccaggccacggtcgctggacacggcaacgccgatgtctgcatagccgtggtaaacgatgtcggtaccgtcgatcgaggcgttgacagccgggtagcgtttcagcgcttcggtggccgctttcacgaagaacgacatgaagcccaggcgcacaccgttgtgggacttctcgaacagatccttgtacttcgaacgcaacgccatgacttcggtcatgtcgacttcgttgaaagtcgtcagcatcgccatgttcgactgtgcttcaaccagacgcttggccactgtggcacgtacgcgggtcatcggtacgcgcttctcggtgcggtcgccagcggcgaacacaggtgcagcggcagccggagcagcagccttggcaggtgcggcagctggagcgtttttcttggcttcaaccgcggcaaccacgtcttccttggtcacgcgaccatctttgccagtgcctttgatggaagccaggttgatgccgttctcttcagccagctgacgggcagccggtgcagcgatcgggtcttcagcgccagcagccggggcggcagctggagcagcagcggcggccggtgcagcagcggcaggagcagcggcagcagcactgccctcttcgatcgaacccagaacctggttcgacagaacggtagcgccttcttctgcaacgattgcgcccagtacgccgtcagcttcagccaacacttccagaacgactttgtcggtctcgatgtcgacgatcaggtcgtcacgcttgacggcctcgcctggtttcttgtgccaggtggcaacggtgccatcggcaaccgattccgggaatgacggggctttgatttcgatagccattatctgtgggtccttaaaattcggtttcagtcagcgcgaaggcgttaaacagtgaaagcatcttgcagcagtttttcctgctgctcggcgtgcatcgacgcataaccacacgcaggtgcagcagaagcatcacgaccggcgtactccaggccaagacctgttttgtggttaccgatgctgcgacgcaaatgatgctggctactgtaccaagcgccctggttcatcggttcttcctgacaccacacggcattcgtgaggttggtgtaaggcgcgatggcctccatcaggtcgtcttccgggaacgggtaaagctgctcgatacgcacgatggcgatgtcttcgcggccctcgctacggcgtttttccagcaagtcgtagtagaccttgccgctgcacaggatcaggcgagtgaccttggcggcgtccagcgtgtcgatttctggaataacggtctggaacgaaccatccgccagatcttccagggtcgagatggccaatttatgacgcaacagcgacttcggcgtcagcactaccagcggcttgcgcagcgggcggatcacctggcgacgcagcaagtggtagatctgggccggggtagtcggcacgcacacctggatgttgtgctcggcgcacagctgcaggtaacgctccagacgggccgaggagtgctcaggaccctgaccttcataaccgtgtggcagcaacatggtcagaccgcacagacggccccacttgtgctcgccgctggtgatgaactggtcgataaccacttgggcaccgttggcgaagtcgccgaactgggcttcccagatcaccagcgcgttaggcgtggtggtcgagtagccgtattcgaacgccagcacggcttcttcggacaggaacgaatcgtacaggtcgaaacgtggctggccttcgtacaggttctgcaacgggatgtaggtgcccgcatctttctggttgtgcagcacagcatgacggtgcgagaacgtaccacggccgatgtcctggccggtcatgcggatcgggtgaccttcgaacgccagggtcgcgtacgccatggtttcagcgtaaccccagttgatcggcaggccgccggcttgcatcttctgacggtcttcgtagatcttcgcaacctggcgctgtacgacgaagccatccggaatttccagcagcttggcagacagttcctgcagggttttcagatcgaacgaggtgtcgtgacgcgcggtccaggcgtggcccaggtaagggcgccagtccacgaacagctctttgttcggctctttaaccaggcttttcactacgtgcaggccgttatccagcgcgttgcggtattcatcgatcttcgcctgaacacgtgcatcgtccactacaccggccttgatcaggctgtcggcgtacagctcacgggtagtgcgctgcttggtgatttgctggtacatcaacggttgggtgccgctaggctcatccgcttcgttgtgaccgcgacggcggtagcagaccaggtcgatgaccacgtcacgcttgaactgcatgcggtagtcgatggcgagctgggtcacgaacaacacggcttccggatcatcaccattcacatggaggatcggtgcctggatcatcttggcaacgtcggtcgcgtactcggtagagcgcgcgtcgagcgggttgctgatggtgaagcccacctggttgttgatgacgatgtgaacggtaccgccggtcttgaagccgcgagtctgcgacatctggaacgtttccaggaccacgccttgaccggcgaatgccgcgtcaccgtggatggaaatcggcagaaccttttcaccggtggaatcgttgcgacgatcctggcgcgcacgtaccgaaccctcgaccaccggggaaacaatttccaggtgggatgggttgaaggccatggccaggtgaacttcaccgccggtggtcatcacgttggacgagaagccctggtggtatttaacgtcaccggaacccaactcgaccttcttcttgccttcgaactcgtcgaacagctcgcgcgggttcttgccgaaggtgttgaccaacacgttcaggcgaccacggtgagccatgccgatcacgatttccttggtgccataggaaccggaacgctggatcagctcgtcgagcattggaatcaggctttcaccgccttccaggccaaaacgcttggtgcccgggtatttggtacccaggtatttctcgagaccttcggctgcggtcacgcgctccagcaagtggctgcgtacatcggcagacaaaaccggacggccacgcacaccttccagacgatgctggaaccagtggcgctgctcggaatcggtgatgtgcgtaaattcagcgccgatggtgcggcaatatgtctgctgcaacgcttcgtgaatttcgcgtaggctcgcttcctctttgccgatgaacaggtcgccggcacggaaggtcgtatcaagatcggcattggtcaagccgtaatgattgatcgacaggtctgcaggtgcaggacgcttccagagccccagcgggtcaagctgggccgcctggtggccgcgcatccggtaggcctggatcagtcgcaatacttcaacttgcttcttctcgtgctcgctgctcacgctaccggcggaaaccggttgggcgcggcgctggttctttgccagcagcacaaactgatcgcgaattgttgcgtgcgatacatcggtggcagcgttgccgtctgaagacaacgtctgaaatttggtgcgccattcttctggcacagcgttagggtcgtgcaggtagagctcataaagctcttccacataggcagcgttaccacctgaaagatagccgctgttccacatgcgctgcatcacgctttcttgcatgcttggtcaccctcgatttggggacaccaccggcgaaaacaccgagtttgcttgcaaaaggccaagtgcagcgaccaaaacaagccacttaggatcacgctgatagttcgggtaccaacccgaatgcccctgcttgtctcatttcttcaaaataagagctgcggctttgtaagtcgctgctcaagttaaaactacggcgccggttgaagcctgcgccgcagcatttacgggcacaacggtcctgcttttaccacaacgccagttacacgccgctctgcagcagcatgttacggatgtgaccaatggccttagtcgggttcaggcctttgggacatacgttgacgcagttcatgatcccgcggcagcggaatacgctgaacgggtcatccagtgaagccagacgctcggacgtcttggtgtcacggctgtctgccaggaagcggtacgcttgcagcagggcagccgggcccaggaacttgtccgggttccaccagaaggacgggcacgaggtcgagcagcaagcgcacaggatgcactcgtacagaccgtcgagcttttcgcgctcttcaggggactgcagacgctcgatggccggagccggcgtgtcgttctgcaggaatggcttaactttttcgtattgcttgtagaagatgctcatatcgacgaccaggtcacggataaccggcaaacctggcagtggacgaacgatcagcttgttgcccttcacaacagcggacagcggcgtgatgcacgccaggccgttcttgccgttgatgttcatgccgtcggaaccgcaaacaccttcacggcaagagcgacgataggagaaaccctcgtcctgctctttgatcagggccagcacgtccagcaccatcaggtctttaccaccggtatcgacctggaattcctgcatgaacggcgcggcgtcctgatcagggttgtagcggtaaacactgactttcaacatggcagccacccttagtaagtccgaatcttcggttcaaacgtcggaaccgtcttcggcgagaagttcacggcacgcttggttacgcgcttgtcacccgggaagtacagggtgtggcacaaccagttttcgtcgtcgcggtcttcaaagtcttcacgagcgtgagcaccacgggattctttacgaacctcggcggcgatcgcagtcgcttcagccacttccagcaggttttgcaattcaagggcttcgatacgagcggtgttgaacgcctggctcttatcgttgatcttgacgttggcgatgcgcttgcgcaggtcagccagttgggcaatacccttctgcatgtattcgccggtacggaacacaccgaagtagttctgcatgcagctttgcagctcgcgacgcagggtagccacgtcttcgccatcagtgcgctcgttcagagcgttcagacgggccagcgcagcttcgatgttggcgtcggtcgcgtcatcgtattcgatgccgtcggtcagcgctttttcgaggtgcaggcccgcagcacggccaaataccaccaggtcgagcagcgagttgccgcccagacggttggcaccgtgtaccgatacgcacgccacttcacctacagcgaacagaccgtgaatgatttcgtcctggccatcggcgttctgggtgatcgcctggccatgaatgttggtcggcacgccgcccatcatatagtggcaagtcggaacaaccggaaccggagcaaccaccgggtcaacgtgagcaaaggtcttggacagctcgcagatacctggcaggcggctgtgcagcacttcctcacccaggtgatcgagcttgagcagtacgtggtcgccgttcgggccgcagccgttgccggcgatgatctctttaaccatcgaacgggcaacaacgtcacgaccggccaggtctttggcgttcggagcataacgctccatgaaacgctcaccgtgcttgttgatcaggtaaccaccttcaccacggcaaccttctgtaaccagtacaccggcgccggcgatgccagtcgggtggaactgccacatttcaatgtcttgtaccggcacgccggcacgcaatgccatgccgacgccgtcaccggtgttgatcaaggcgttggtggtcgacgcgtagatacggcctgcaccgccagtcgccagaacagtagccttggcgcgaatgtaggtggtttcaccggtttcgatgcagatggcgatcacaccgacgaactcgccttgtgcgttcttcaccagatcgacagcgtagtactcgttcaggaacgtggtaccggctttcaggttgccctgatagagggtgtgcagcagcgcgtgaccggtacggtcggacgcagcgcaagtacgggcagcctggccgcctttaccgtaatccttcgactggccgccgaatggacgctggtagatacgaccctgctcggtacgcgagaacggcagacccatgtggtccagctcgaacacggcggccgggccttcctgacacatgtattcgatagcgtcctggtcaccgatgtagtcggaacccttgacggtatcgtacatgtgccagcgccagtcatcgttcgggtcggcggacgcgatggcgcaggtgatgccaccctgggccgaaacggtgtgggaacgtgtcgggaacaccttggtgatcacggcagtcttgtgaccgccctgagccagctgcagcgctgcgcgcatgccggcaccgccgccaccaataatgatggcgtcgaaggaaatagttggaatgttagccatgaatcagataccccaaagaatctgcacaccccagacgaagtaagcgaacatcgcgacgccgcatactgcctggaagaggaaacggactgcagtcgcggacttgcccagcgccatcggcgtcaggtagtcggtcgcgatggtccacatgccgacccaggcgtgtgcgcccagggctacaagggccagcagactgaagattcgcatcgcattgtgggcgaacaggccatgccattgttcaaaggtgatgcccgggtgtgcgacgaggtatccgatcaggaaaatgaaataagccgcgagaacgaccgcagacacacgttgtgccatccagtcatagaggcccgaacgcgaaaggttcgtaacgctggttaccatatccaaactcctgccagaacgatcagcaccacggaaatggcgatgatgattttcgagcccaggcggccgccttccagcgtctcaccgatacccgcatccatgatcaagtggcgcacaccggcaaccaggtgatacagcagagcggacaggaggccccatgctacgaacttggccagcgggctggtcaagcatgccttcacctcggcgtaaccttccgcggaacccagggatttgctcaatgcataaagcatgatgcccaggcccaggaacaggatgatgccggaaacacggtgcaggaacgacgtaacgccggtgatggggagtttgatggtccttaggtctaggtttacaggtcgttggctattcacggctttttttcacactgaagagcccctaacaatcagggcaaagttgttggggagtgcactggtcaggtaagcaccacccagggagtgcgacccccaatgaaagcaagcccaaaagcccttggcggtcggtggccgagtatagacagttaggttactaatgacaacgcgcgctcctcaccctaatagctgattgcgttggcgggataaaaggcgtaaatggcagtcaatttcgacgaaaaagtacggttaaagccttctggagcaagactttaggcaaattgacatctggatttatatcaatatagtggtgcgggccctgcgtggggggtctgtctgatgatttgaagcataaataggaggccacatggctgacaaaaaagcgcagttgatcatcgagggcgcagcccccgtcgagctgcccattttaaccggcaccgttggtcccgatgttatcgacgtacggggcctgacggccacgggccgtttcacattcgacccaggcttcatgtcgaccgcctcttgcgagtcgaagatcacctatatcgatggtgacaatggcattctgctgcaccgcggctacccgatcgagcaactggccgagaagtcggactacctggaaacctgctacctgctgctcaatggcgaactgccaacggccgagcagaaagccaagtttgtcagcaatgtaaagaaccacaccatggttcacgagcagttgaagaccttcttcaacggcttccgtcgcgacgcccacccgatggccgtcatgtgcggcgtggtcggcgccctgtcggccttctatcacgactccctggacatcaataacccgcagcatcgcgaaatctccgcgatccgcctggttgccaagatgccgaccctggccgcgatggtttacaagtactccatgggccaacccatgatgtacccgcgcaacgacttgtcgtacgcggaaaacttcctgcacatgatgttcaacacgccgtgcgagatcaaaccgatcagcccgacactcgccaaggccatggaccggatcttcatcctccacgccgaccacgagcagaacgcctcgacttctaccgtacgcctggcgggctcttcgggtgccaacccgttcgcctgtatcgccgccggtatcgctgcactgtggggccctgcccacggcggtgcaaacgaagccgtattgaccatgctcgatgaaatcggcgatgtctcgaacatcgacaaattcatcgccaaggccaaggacaagaacgatccgttcaagttgatgggcttcggtcaccgggtctacaagaaccgcgacccgcgcgccaccgtgatgaagcagacctgcgacgaagtactgaaagaactgggcatcaagaacgatccgcagctcgaactggccatgcgcctggaagagatcgccctgaccgacccgtacttcatcgaacgctcgctgtacccgaacgtcgacttctactcggggatcatcctcaaggcgatcggcattccaaccagcatgttcaccgtgatcttcgccctcgcacgtaccgtcggctggatctcgcactggaaagaaatgctctccagcccgtacaagattggccgcccacgccagctgtacaccggctacgagtcgcgtgatatcaccaaactggaagatcgcaagtaagcatctaactatttggtcttaaaaacggcctccttttacaaggaggccgtttttatttgtgcagattctgagaaacagttttgtgatatcgactcacaataaaagcaaaaaaatgccccgatctcacgaccggggcatttttttgtaacggttacaacttttagtggttaaccgccccgctcgcccccaggccagtctgcgaacgcacaaactgcgggaagtacaacgcacgctctttctcagccgccgccgacttgtcggtgatggagaagaaccagatgccgacgaacgcaatgatcatcgagaacagcgccgggtactcgtacgggaagatggctttttcatggtgcaggatcgagacccagatggtcgggccaaggatcatcaggccgacggcactgatcaagcccagccagccgccaatcatcgcgccacgggtggtgaggtttttccagtacatggaaagcagcaacacagggaagttacagctggctgcaatggagaacgccaggcccaccatgaatgcgatgttctggctttcgaacaggatacccaggccgattgccaatacacccaaggccacggtggtgatcttcgagacgcggatctcatccttgtcgttggccttgcccttcttgatcacgctggcatacaggtcgtgagacaccgccgaagcaccggccagggtcaggccggcgaccaccgcgagaatggtggcaaacgccacagccgagatgaagcccaggaaaatactgccgcccactgcgttggccaggtgcaccgccgccatgttgttaccgcccagcaaggcgcctgccgcatccttgaacgccgggttggtgctgaccagcaggatcgcgccaaaaccgatgatgaacgtcaggatatagaagtagccgatgaagccagtggcatacagcacgctcttgcgcgcttccttggcgtcgctcacggtgaagaagcgcatcaggatgtgcggcaggccagcggtaccgaacatcagtgccaggcccagggagaatgccgagatcggatctttcaccaggccgccagggctcatgatcgcctcacctttagggtgaaccttaatcgcctccgagaacagcatgttgaagtcgaagttgacgtgcttcatcaccatcagcgccatgaacgaggcgccggacagcaacagcacggccttgatgatctgcacccaggtggtcgccagcatgccgccgaacaacacgtacatgcacatcaggatacccaccagaatcaccgcaacgtggtagtccaggccgaacaacagctgaatcagcttgcccgcacccaccatctgcgcgatcaggtagaacgccaccaccaccagcgagccacaggccgacaggctgcggatctgggtttgccccaggcgataggacgctacgtcggcaaaggtgtacttgcccaggttgcgcaggcgctcggcgatcaggaacagaatgatcggccagcccaccaggaagccgatcgagtagatcaggccatcgtagccggaggtgaacaccagcgcggaaatccccaggaaggacgccgccgacatgtagtcgccggcaatcgccaggccattctggaagccggtgatcttgccgcccgccgcatagtagtctgccgccgacttgttgcgcttggacgcccagtaggtaatgcacagggtggcgccgacaaacgcgataaacatcacaatggccgagatgttcagcggttgcttatgcacttcaccggtcaatgcatccgccgcccaaacggccggagcaaacagcgaagcgccgaatacagccaatagacgccggatcattgcgcagcctccttgagaatcgcattgttcaggtcgtcaaattcgccgttggcccggcgtacatagataccggtcaggatgaaggcggacacaatcagtccgacgcccaggggaataccccaggtaatcgaggaaccggggctgatcttggcccccagcacttgtggcccgtaggcgatcaacaggatgaaagcggagtaaagccctagcatgatcgccgagagaatccaggcgaacctttccctttttctgaccagctccttgaaacgcgggctgttttgaatcgagaggtaaatgctgtcgttcattgtttttatcctcgcagcacagctttttattattttggaacgtatccactgtatgcggctgccgtagaggttccagacgaccttagtcttagatcgagtgtagcgagggattgtcagagcgcaggaggatttgcaggcggtgaaagtcatgtgggagcgggcttgcccgcgatggcggtggctcagtcaactgatgcatcgactgacacactgctatcgcgggcaagcccgctcccacatcaggttacaggtgaatggttatttggcggtccactcggctacacgctcagggtgcttggccacccaatccttggctgccgcgtcaggtttggcgccctcttggatcgcgagcatgacttcgccgatttcatccttggaggcccactggaatttcttcaggaaggccgcaacttccggcgctttcttctccaggtccttgctgccgatgctgttcacggtttcagcagcaccataaatcccttttggatcgtcgaggaaacgcagtttccacttggcgaacatccagtgtggcacccagccggtgaccgcgatggattcctgtttgtcttcggcgcgggtcagttcggcgatcattgccgcgccggagctggcttgcagcttgtagtccagaccgtaagccttgatggcctcatcagtcttgagcatcacgcctgaaccggcgtcgatgccgacgattttgttcttgaaggtggtgtcggtcttgaggtcttcgatggacttggccttgacgtactccggcacgatcaggccgatcttcgcgtccttgaagttggggccgtagtcgaccaccttgtccttgttcttggcccagtactcaccgtgtgtcacaggcagccaggcggagagcatggcatcgagcttgccggtggccacgccctgccacatgatcccggtggcgacggcctgcagtttcacgtcataaccgagcttttgcttgatcacttctgccgctacgtgggtagtcgccacgctgtcggaccagccatctacatagccgatgctcagggttttgctgtcggcgctggccagtgtggagctcatcgcaactaccagagtggcagctgcgcccaagagtcgtcgcatcttcatcgtacttccccgaaagtgctgcgcccggcggatgccgagcgacgtcaacctagttgttatggtggtgcaccgcgcccccttcacgcgcatcgatccggctgctgccccatcagtggagtgctgatgctttgatcatcaacctgacggggcttgcaacctgctctgactgcgacctcaggtaagcaagaaacgacatcacatcgccagcaggacgcttcgtaggacttggcgtcaaaatcccgcccgaactttgcatgtcaaaattatgcagccccactgggacgggacaaatccgggtaagatgcgcgcctttgctcccccagataagccgaccatgcccgcgaatgcccgctttcctgccctgccctattttttcgccctgatcctcggtgtgctggcccttgtcggctattggtatggcctcggccggccagtggtgctgccggatgtcgccagcgccagccacaagatgcaatgcgcgtcctacacgccgttcgacaaggaccagtcgcccttcgaccaaccgttcaagctgcgccccgagcgcatggacgccgacctcgcattgctggccacccgctttgagtgcattcgcacctactccatgaccggcctggaagcgttgccagacctggcccgcaagcacggcttgaagttgatgatcggcgcctgggtcagcagcgacccggtggcgactgagaacgaggtcgaccaattgattgcctcggccaatgccaacccggatgtcgtgacctcggtgatcgtcggcaacgaagcgctgctgcgcaaggaagtcaccgccaaacagttggtgaggttgatccacaaggtcaaaagccacatccagcaaccggtgacctacgcagacgtgtgggagttctggctgaaacacccggaaatcgccccggcggtggacttcctgaccattcacctgctgccgtactgggaagacgacccgtcgggcatcgaccaggcgctcaagcatgtgggcgaagtgcgccagaccttcggcaataaattcgcccccaaggatgtgctgatcggcgaaaccggctggcccagcgaaggccgccagcgtgaaaccgccgtgccgagccgggttaacgaagccaaattcatgcgcggttttgtggccatggccgaagccaatggctggcactacaacctgatcgaagcctttgaccagccctggaagcgtgcgagcgaaggcgcggtcggtggctactggggcctgttcgatgcggaccgccaggacaagggtattctcgccgggccggtaaccaatctgccgtattggccgctgtggctgggcattggcggggtcatcctgctcggtacgctggcgctcggtggccgcgtacgcagcacccgtgccgccatggccttgccgttgctcggcgctgtcgccgcctgctccatcggcacttgggccgagctgacccgcgtgaccgcacgcttcaatgatgaatgggtgtgggccggcttgctggtggtgctgaacctgctggtgctggcccacgcggcgctggccttgagctcacgggaaggctggcgcgagcgcgccttcaactggctggagaaacgcgcaggctggctggtggcgattgccggcttcgccggtgcggtaatgatgctggcgctggtatttgacccgcgctatcgcagctttccgagtgccgcgctggtgttgccggcgctggtgtacctggttcgccctgtaaccgggccgcgtcgggagattgcgctgctggcctttatcatcggtgccggcattgcgccgcaactgtatcgcgaagggttgctgaaccaacaggcttggggttgggcggtggtgagtgtgctgatggttgcagctttgtggcgttgcttgcgggtgcgcaaggcttgacaccgctatcgcaggcaagccagctcccacactgaccgtgttcacagttaggagtatgtgaacccaatcaagtgtgggagctggcttgcctgcgatgaggccctgtcaggctgcccttggcttcctgaccaaccgcaaccccgcaatcaccaccgcaaacactgcaaaagtcgtgttgtacaacgccaacgccggcaaaccgaacaccatccccagcaccgccaacccccagcccgcacggcccggcacaagaaacgccagcaccgccgtgaccagcgccgcccagcccagcaccttgaagtggatcatcagccccaggttcgagcgcaactggcattcccagcggctggcctcatcggcgcagatgccgacccactgaccgtcctccataaagccataacgtgcgccataactggcagccagccatagcggcagggcaataagcagcaggatccagggcaaacgacgggacattggagtactccgaaaggcaaaaacggcgctcagcttaatcccccggcggccattggcaaggtgcgtacacagataagtgttcaacaaagcgtcgcaaagtgtatcgtctggctactattaccccgaatccgacgtttatttccgacttttcgtgccgagtgctggcacttcggcgatagcacggtggtcatagcctgcgaacttcattcagcacctttcctcttagggattaagtcatgctccgttccttgcgctgtgttgccctgttgggcagcctttttctgagtgcgtcagcactggcggtcgacatagaccaagccacctatggctaccctttgacgaacccgttcgaagcgaccatcgcgaccacaccaccagaccttcggcctaaattgccgagcgacgacgaaatcaaccagtccgactacaccctgaacatgcgccccgagcgcgagttcagcctgccggataacttctgggcagtgaaaaagctcacctaccgcatcgccaagcaagaccacgccgcgccgctgatcttcctgatcgcgggcaccggcgcgcggtttgacagcagcatcaacgaatacctgaaaaagctgtattaccaggccggctaccacgtcgtgcaactgtcgtcgcccaccagtttcgacttcatcagtgcggcttcgcgctacgccacgcccggcgtgacgcaggaagacgccgaagacatgtaccgcgtcatgcaagccgtgcgtgcgcagaatgcttcactgccgatcaccgacttctacctcaccggctatagcctgggcggcctggatgcggcatttgtgagcaagctcgacgagacccgccgcagcttcaacttcaagaaagtgttgctgctcaacccgccggtcaacctctacacctcgatcaccaacctcgacaagctggtgcagaccgaagtcaaaggcatcaacaacaccaccaccttctatgagctggtgttgaacaagctgacccgctacttccagcagaaaggctacatcgacctcaacgacgccctgctctacgacttccagaactccaagcagcacctgaccaacgaacaaatggccatgctgatcggcacctcgttccgcttctcggcggccgacatcgccttcacctcggacctgatcaaccgtcgcggcctgatcatcccgcccaaatacccgatcaccgaaggcaccagcctcacgcccttcctcaagcgtgcactgcaatgcgacttcgattgctacctcactgaacaagtgatcccgatgtggcgcgcccgcaccgacggcggcagcctgctgcaactggttgaccaggtcagcctgtacgccctcaaggactacctgcacagcagcccgaaaatcgccgtgatgcacaacgcagacgacgtgatcctgggccccggcgacctcggtttcctgcgtaaaaccttcggcgatcgcttgaccgtctacccgctgggcggccactgcggcaacctcaattaccgcgtcaacgccgacgccatgctggagttcttccgtggctaaatatcttctgctgctcgccgccctgatgtgcgcaggcgttgccaatgccgacaacagcaaggcccacgaaccggtcaaggttgactctgacggcttcaaggaaccgctgaccaagctcaagttcaacccgggcctggaccagcgtgagttcgaacgttcgtcgctgaccgcgctcaacgtctacgacccgctggagtcgtggaaccgtcgcgtgtaccacttcaactaccgcttcgaccaatgggtgttcctgccggtggtcgacggttaccgctacgtcacgcccagctttctgcgtaccggcgtgagcaacttcttcaacaacctgggcgacgtgcccaacctgttgaacagcctgctgcaactcaagggccatcgttccctggaaaccaccgggcgcctgttgctcaacaccaccatcggtatcgccggcctgtgggacccggccaccgccatgggcctgccgcgccaaagcgaagatttcggccaaaccctgggcttctatggcgtgcccggtggcgcgtacctcgtgctgccgatcttcggcccctcgaacctgcgcgacaccaccgggttggtcgtcgactacggcgcggaaaccgagatcaacttcctgaacgtctccaaagtcagcgaaaaccacccggaaatctgggccctgcgtgcggtcgacaagcgttatcagaccagcttccgttatggtcagatgaattcgccgtttgagtatgaaaaagtgcgctacatctacaccgaatcgcgcaagttgcagattgccgagtaaaccgggcgccacaaaaaaggccattcgaatgaatggccttttttattgcctgcaattattcaagccttcagggctttccaggctttgccggttacgctgaccaccgccaatacaagcgcccccgcagcaacccccgccaccgcattcagcaaggtcggcatcaaccacgccagcccgccagtgttctggctcactgcgtcaatccagtgatgcaccgccggcatgccgtgagtcagaatgccgccgccgaccataaacatcgccgccgtgccgatcaccgacaggcttttcatcatgtaaggcgcggcgcgcaaaatcgccccgccgatactgcgagccacctgaccaggcttttgggtgagccacaggcccaagtcatccagcttgacgataccggccaccagcccatacacgccgaccgtcatgacaatggcaatacccgacagcacgatcacttgctgcatcagcggcgcatccgccacagtgccgagggtgatggcgatgatttcggccgaaaggataaagtccgtgcggatggcgcctttgatcttgtccttctcaaacgccaccagatccgtcgcaggatcagccacggcctcgaccagatgcgcctgttcttcggtgcgtttgtgcaaaaagctatgcgcaagcttttcaaacccttcaaaacacaaatacgcgccgcccagcatcaacaacggcgtcaccgcccacggcgcaaatgcactgatcaacagcgcagccggcaccagaatcaacttgttaacaaacgagcccttggccaccgcccacaccacgggaatctcccgctcggcccgcaccccggacacctgctgggcattgagcgccaagtcatcaccgaggacaccggcggttttcttggccgccattttggtcatcaacgccacatcgtcgagcacggcggcgatatcgtcgatcagtaccaacaagctgcttcctgccatgattcgggcatcctgcatttaaagtgccgcgaatatagcgcggcagcggccatggaatatacctacccatccaactgctgccggctgttgctctgcttttgatctgcttttgactttgatctcatgcgccccgttaaccacgctggccgcacgcaggcttgaatccgtgggtaacccggcaggacgccgggttagccgcgatgggccagggatggcccatggcggcggcccacggattcaagcctgcgtgcgggcacaccgagcgtgagcgaggtgccgagtggtggggcgaaggccttttggttacttttgggcctttccaaaagtgacccgctgtaagagcggaaccaattccagccgttaccgcagcaatggatatgtactccgacccaagagatgtagcgcctgccacaccgccttcgcgagcaagtcgaatcgtcgcaccgccgctcccacatttggatcgtggggcatcagcaagacagtgggcgatctgaaggccgccatcgcaggcaagccagctcccacatgggggcaccggtgaatcagggttgccagccgccacccaggctttgaaccaacgccacactcccctgactcaactgcccctgggtatcgcgcaaattctgctcggcttgcaggagcacaagctgctgagtcagcaccgcctcacggctcaccgtacccgcccgcaattgcgcctgctggctaccaaacaactgctgattacgcgcaaacacctgcccaaacgcatcagcctgcgtctgcagatgattgatcgccgacaagttgtcctccacattctgcaacgcactgagcaccgtgccacggtagttggccgcaatctggtcataactggcctcagcctgcttgaccgctgcctcgcgtgcgccaccgtcaaaaatcgtctcagccagcgcaggcccaagggtccagatgcgattgggcaacgaaaacaacccacccaacgcactgccgcgatagcccgccgacgccgtaaggtccagggtcggaaaaaacgccgcctgcgccacaccgatcttggcattcgccgccgccgccgaacgttcggccgccaccacatccggccgccgttgcagcaacgtcgacggcaacgacaacggcgggcgcggcaccacgaaagcaaaatcggtacgcggcgccacactgaactcactcggcgccacccccaccagcaccgccagcgcatgttcgtattgctcacggttgcgcagcgacgtctgcaagtcagcaatcgaagtggtcagttgatcctgcgccaccagcaactggtcattggtcgcaacaccttgggtgaactgcgcctgaatcatgtcgagcaattgctgattgatggcctgctgctgttgcaacaagcgcacgtcgatgtccatctggcgcagcgccaggtaattactcgccacgctggagctgatcgacaaacgcaccccggcgagcagcgcatccgattgctgcgccgaggcctggcttgactcaatgccgcggcgcacctggccccacaaatccggctcccaactggcggtcaacgtcgcgctgactgtgtttttcaccccggtggatgccgttgaactcgaactgctgccatcaccgccctccccccgcgagcccgacaaccccacgcctaccgtcggccacaacccggcgcggctcgacgccacctgcgcctgagccaaccggtacgccgcctcggcggcaatgatcgactggttggcctttgccgagcgcgccaccaaatcgttcaacaccgggtcctgataggccagccaccactggctgtccagcgcgccttgcgggttggacgccgcgcgctgccactgcgcgccttccttgaacgactgcggcagttccatggcaggcttttgatagtccggcccaaccatgcaaccacccagcatcaggctgaccaccagcacgctaactctgaatttcatgaccttgcttccttgtgccgccccaggcgttgcgacgcccggtcgagccagaggtaaatcaccggggtggtgtagagcgtcagcacctggctgagcagcaacccgccaataatcgaaatgcccaagggccggcgcagttccgagccatagcccgtgccgagcaccagcggcaacgcgccgagaattgccgccagcgtggtcatcatgatcggccggaagcggatcaggcacgcgcggcgaatcgcctctttggcactgaggccaaactcacgccgctcagtgatcgcgaagtcgatcatcatgattgcgttcttcttcacgataccaatcaacagaatcacccccaccagcgcaatgatcgacaactcagtgcccgtcagcagcaaggcaatcaacgcgccgacacccgccgagggcaaggtggaaagaatggtcagcgggtgcatcaggttttcataaagaatgcccagcacgatgtacaccgagagcagcgcggcaacgatcaacaacggctcactggccaccgaggactggaacacctgggccgtcccggcaaactgcccggtgacgctggccggcatgcgcaactgcttcaccgcgtcatccaccagttcggtggcctggccgatggacgtgccgggcgccaggttgaacgagacagtgaccgccggaaacgtgctttggtgactgatggaaatagcggtgcgtgccactgcgttatccgccagcgccgacagcggcaccaagggcgccgggctggccagattcggcacggcggtggtgcccctggccgacactgcctggctgccgctcggcacgtaaatgcccttgagcgcttgagggtcggtccagtattcgggggcgatttccatcaccacgtggtactggttggcggcgcgataaagcgtcgacacctgacgctggccaaaggcgtcataaagggtttgatccaccgccgacatccccacgccgagccgcgcggccgtgtcacggttgatgtgcacattggccaacaggctgttgtcctgctggtcggtgttgaggtccgtcaattgcggcagcttgtgcagcacggccaccaccttgggcacccattcgtccagcgaggactggtcgtcggcggtgagcgtgtattgatattgcgccccactttgccgcccacccacggtgatgtcctgggccgactgcaggaacagcttggtccctggtaaatcaccgagggtacggcggatctgcgcgatcacttcggtggcgccgtccttgcgctcgcccaatggcttgagcaacacaaacatctgcgcactgttgaccgccccgccgccaccgcccccgccgccgacaaacccggcagcggtttccacgttggggtttttcatgaccttgcgattgatttcggtgaagtccttttgcattgccccgtaggaaatgctctgcgccgcaatgatgctgccctgcaggcgcccggtgtcttcctgcgggaaaaaacccttgggcaccagcacatacaacacccccgccagcacgatgaccagcaccgtcaccaggcccatcagaatcgagtgatcgatgacccagcccagcgtgcggtcatagaagcgatgaaagcgcgaatccgggtgttcattgccctcatgaacctcctttggcgcacgcagcaacacgctggcaagcatcggcgtgaccgtcagcgaaatcaccatcgaaatcacgatggccaccgacaacgacactgagaactcgcgaaacagccgcccgacaatcccgcccatcagcagcaacggaatgaacaccgccaccagcgacacgctgatggtcatcaccgtgaacccgacttcctgcgccccggccatcgcggcttccacccgcgtcttgccgcgctccaagtgacgcatgatgttttccaccaccacgatggcgtcgtccaccacaaagccggtggaaatggtcagagccatcagcgagaggttgttcaggctgtaaccgaggaaatacatcgcgccaaaggtgccgagtaacgacaacggcaccacgatggcgggcaccagcgtactgcgccagtcgcggaagaaaccaaaggtcaccagcgtgaccagcaggatcgacgccagcaaggtcacttccacgtcatgcaacgagccacggatggtggtggtgcggtccatcagcaggttcagcttgatcgacgccggaatcgagctttgcaagaacggcagcgaggctttcaccgcgtccacggtgtcgatcacgttggcgcccggttgcttgaacaccaccagcagcaccgccggcttgccgttggacaggccgaagttgcgcaggtcctgcacgtcttcgcgcacgtagcccaggtccgaaatatggatcaggtcgccgttgtgcgccttgaccaccagcggcccgtaatcgtggctgtcgagcaattggtcattggcgccgatgccgtaggagcggtcgcccaccgccacattgcctttgggcaggttggcgttggaggcgctgatgacttggcgcacctgttccaggctgacgccatattggttgagccggtcggggttcaattcgacccgcaccgccggcagcgccccgccgcccacggtcacatcgccgacgccggtggtttgcagcaaacgctgctccagcaccgtcgaggccgcgtcgtacatttggccgggcgtggcgctgtcggaggtcaggctgatgatcaggatcggcgagtcggccgggttgaccttgcgataggtcgggttaccggacaggtcactcggcaagttgctgcgcgcggcgttgatcgcggcctgcacgtcccgcgcggcgccgtcgatgtcgcggctcaagtcaaattgcatggtaatgcgcgtcgagcccaggctgctggccgaggtcatttgcgtaacgccggcaatctgcccgaactggcgctccagcggcgtggccacggagctggcgacggtggtcgggtcggcgccgggcaacgaggcgctgacgctgatggtcgggaaatccacctccggcagcggcgccaccggcagcaggttgaacgccagcaccccaaacagggccagcccggccgccagcagcgtggtggcgatggggcggcggataaacggcgcgctgaggttcatcgcatcaatccacggcaaccggacgacggctgaaacgctcgcccaggccgtgcatggcgaggaagatcaccggcgtggaaaacagcgtgagcaactggctcagcaacaggccgccgatgatcgcgatgcccagcgggtggcgcagctccgagccaatgccagttcccagcgccaacggcaccgcaccgaacagcgaggccatgctggtcatcaggattggccgaaagcgcagctccgccgcctggcgaatcgcctgaaccgggctcaagccgccctcacgcaacagctccagcgcgaagtcgaccatcatgatgccgtttttcatgacgatgccgatcaacaacacaatgccgatcaggccgatgatgtcgaactgcgtgcccgtgaccagcagcgccagcaaggcgccgagtgccgccgagagcagggtcgacagaatcgtcaccgggtgcacaaagctttcgtacagaatccccagcatcaaatacaccaccacaatcgccgccagcaccagaaacacctggttggacaacgaggcctggaatgtcgccgccgcgccttcgaggttggcctgcaccgacagtggcagcccgactttcgcctcaatggcctgcaagcgcgtcaccgctgcgcccagcgtctggccgggcgcaaggttgaacgacacgtccgcgtagggaaattgccccagccggttgatggtcaccggcgcgcgcaccacgtccatggtcgccatgctcgacagcggcgccacgccgccgccgggaatgtccacgtacagaccggtcagcaaatccggcaggttgcgcggcggatggtcggtggcgatcaccacgtggtactggttgagctgggtgtagatggtcgagacctggcgctggccgaaagcgtcgtagagcacgtcgtcgatggcctgcggcgtgatgccaagacgcgaggccgtggcgcggtcgaaggtcagcttgatctggttgccgaactgcatcgcctggttttgcacgtcggtgaacatcgggtcttttttgatcgcggcgagcagcttggtggtccactgctccagctcgtccgggtcagtggcttgcaggccgagacggtagctggtggtggacacggtggcgtccagcgtcaggtcctgaactgaatgcaggtacaaacggatgccggcgtcgtcggcattcgcgtcggccaggcggcggatcacttcggtgctgctgtcgcgctcgccacggggtttgaggttgatcagcaggttgccctggttgatggtcgggttggtctggtcgataccgacgaacgaggacaggctcgccacggccgggtccttgagaatacgcgccgccaggcgctgctgctcggcttgcatctgctgaaacgacacggtcggcgaggcctgggagatgccctggatcaagcccgtatcctgatcggggaaaaagcccttgggcatgatcaccagcgtgaacaaagtcagcgcggcggtgagcaccaccgaaatcaacgtgagggtgcggtgcgccaacacccaatccagcccgcgtacgtaatggcggttgatacggtcgaagaaatccgcgcgacgttcctcgtgcctggacttgagcatgcgcgcgcacatcatcggcgtgagcgtcagggagatcaccgccgaaatcacaatggtcaccgccacggtcatggcgaattcacggaacagccgcccgaccacatcgcccatgaacagcagcggaatcatcaccgcgatcagcgcgatggacagcgaaataatcgtgaagccaatctgctctgcacccttgagcgcggcttgcaacggcgtgtcgcccgcctccaggtagcgcgtgatgttttcgatcatcacgatggcatcgtccaccacaaaaccgatggcaatggtcagcgccatcagcgtcaggttgttcagggaaaagcccagcgcataggccactgccagtgtgccgatcagcgtcagcggaatggtcaccgccggaatgatcgtggccggcacgttgcgcaggaacgcgaagatcacgatcaccaccagcaaaatcgccaagcccaattcgtactgcacatcggtgaccgaggcgcggatggtttgggtgcggtcggtcagcaccgccaccttcaaagtgcccggcaaactggcgcgcaatttgggcagcagttgctgcacgcggtcgaccacttcaatcacgttggcgccgggctggcgctggatattcagcacaatcgacggcgtatcattggtccacgccgcttgcctggggttttccgggccctgggtcgatgtggcgatttgcgacaggcggatgggtgcgccgtttttgtaggcgatcaccaggtcgcggtattcctcggccgactgcaactggtcgttggcgccgatggaataggcctggaacttgccgtcgatattgcctttggcctggttgacgttggcggtgcccaatgacgtgcgcaggtcatccagcgacaggcccagattattcagcgccgaggtgttggcctcgacccgcaccgccgggcgctggccgccgctgatggtgaccagaccgacgccggtgatctgcgaaattttctgcgccaggcgcgtgtcggcgaggtcttcgactttggtcagcggcagtacgtcggaggtcagcgacagggtcagcaccggcgcatctgccgggttgaccttgctgtacaccggtggatacggcaggttggccggcaggaaggtgcccgccgcgttgatcgctgcctgcacttcctgttcggccacatccagggacagcgacaggtcaaattgcagggtcaccaccgaggcgccatcagagctggtggagttcatcgacttgagccccggcatctcgccgagttggcgctccagcggcgcggtgatcgaggaactgacgacgtccgggcttgcgcccgggtattgggtgaacacctgaatcgtcgggtaatccacctcgggcagcgccgacaccgacaacaagtgataccccagcaaaccgagcaacagcaccgccaccatcatcagcgtggtggcaacgggacgttcgataaagggccgcgaaatattcatgctcggcagcccctcactcggcgacaaccttcacgggcgagccatcgtcgagtttgtcggcgccctcggtgatcacctgttcaccggccttgaccccattgtcgagcaccgccgaaacatccccggtggacggcccggtcttgatcgtgcgcaggctggccttgctgccgttgaccacaaacacgaagtcgcccttgctgccgtgctggatcgcacgggtcggcaccacggcaatctggctcaaggtgtcggccttcagccgcgcgttgacgaactggttgggaaacagcgccgtgcccgagtcatcgaactgcgccttgaccttgatcgtgccggtgctggtgtccacctggttatccagggccagtaggctgcctgtggccagcagggattttttattgcggtcgtaagccagcacggtgacggtgccacgggccagggcctggttgatcgcgccgaggtcatcctcgggcacggcgaacaccacggtggccgggttcatctgggtgatgaccacaatgccggtggtgctggccgtggtgacgtagttgccggggtcgaccaggcgcaaaccgaccacgccatccaccggcgaggtgatggtgcagtaactcagttgcacttcgaggttttgcacattgccctggtcggcggcgacggtgccttgttgctgctgaaccagcgaggcctgggtgtcgagggtttgctggctggtggagccggccttgaccagatcacggtagcgcgccaggtcgcgctgggcgttgctcaacaccgcttgatcgtgagcgagcgtgcctttggccaccgccagttgcgccttgagcgcacggtcatcgatgcgggcgatcacctggcccttgctgacgtgctggccctccttgaattccacgctgctgagaatgccatcgacctggctcaccaccgtgacgctgcgggtggggatgaccgtgccgagggcgtcgatgtacaccggcacatcctgcaaggccaccggcaccacggcgaccggctcaccgggagaaggcggccggcccttgtgggccccaccggaaaaaaagtgcatgcccaaaaccatcaccaacgccaccagcagcaacacgccaatgacccaggcaaacgtacgtcgtctgcttttctccacggtttctcactcgaacgccgaatacaggacaaaacgaccgacgttatcgccgtgtcgctgacctgaactctagcagtgcgccaggcgcaagcctgtactaccgtgaatgcgttcagcatcaagacagacaaactctctgtaacgcccgtgatacaagggctgcacctgtattcttgagcgctgcgtcaagccggtgctaccatgcccgaccgcctgtcatggcaaggaaattcctggtttatgagcaccattcgcgagcgcaacaaacaaatgatcctgcgggcggccagcgaggagtttgccgacaagggcttcgccgcgaccaaaaccagcgacatcgccgccaaggccgggctgcccaagcccaatgtctattactacttcaagtccaaggacaacctctaccgcgaggtgctcgaaagcattatcgagccgatcctggccgcttccacgccgttcaaccccgacggcgaaccgtcggtcgtgctgagcaactacatccgctcgaaaatccgcatctcccgcgacctgccatttgcctccaaagtgttcgccagcgaaatcatgcacggcgcgccgcacctcagcgccgagcaggtcgaacaactgaatgcccaggccaagcacaacatcgactgcatccaaaactgggtggaccgcgggttgatcgcggccattgaccctaatcacctgatgttcagcatctgggcagcgacgcagacgtacgcggattttgactggcagatttcggcagtaacgggaaaggccaagctggatgaggcggattatgaagcggcggcgcagacgataattcggttggtgcttaaagggtgtgagccggactgagggaccgaggtgaggctatcgcaggcaagccagctcccacacaaattgtatgaatagcgcacatcccctgtgggagcgggcttgcccgcgatagcgccctgacagacacatcctgccaaaagcctgccaatcaacatcagccaccaagacctagcctctcagaaccccacctgaagagaggccaaggaatgcctgaactccctgcttcaaagcgactgcgcaccggtcgctatgatgaacccaaccggatctacctgctcaccaccaacacgcttgaccgcgagccaatattccaggatttcacgctcggccggctggtcgttcaacaattcagaattgcccaacaacagcgcttggcgacatccctcgcctgggtcgtcatgcccgaccatttccactggcttatctcactggaaaaaggctcactcgccgacctgatgcgccaggtgaaatccaaaagcactcgcattgtgaatgccgtagctgggcgccaaggtcgcctctggcaaccaggctttcatgaccatgccgtacggcgcgaagaaagcctggaagggattgcccgatatattgtggccaatcctttgagagccgggttggtgaagaagtatggcgactaccccttgtgggatgccatttggctttgatccaaaaccgagtcgcctgcatcgcgggcaagcccgctcccacagggattgatggtgtttacaccggccaatgtgggagcgggcttgctcgcgaagaggccctaacagccaataaagatcaagccgacacacccgcatccgccaacaaccccaccccctcaatcgccgtaatcgcacactgctcatcaatgtccgacgtatccccgctgatcccgatggcccccagcaccacgccctcctggctcctgatcaatacaccccccggtgccggcaccacgctgccctgccccaggctgttcaacgcggcaataaacgccgggcgctgctgcgcgtccagcgccagcaaacgcgagcctttgcccatggcaatcgcgccccaggccttgccgatggcgatttgcgggcgcagcaggctggcgccgtcttcacgttgcagggtgatcaggtggccgccgctgtcgagcaccgcgatggtcagcggcgctgccgaaatcgtacgccctgcggtgagggcctggctggccagttgggtggcgagtttcaaggttaaagcgctcatggtgccgtccttcttttgttattgggaaagcggtggaggtctgaagattcagatgctcgatcaaacaaatagaacacaatgacatttgtttttgtatacaataatttcaaacaaagtctccccatgtcgaaaaaagcgcttcagacgaacgtaaacacaggtttataaaatccattgacctgcgccgctcgccgtgaatacactttggacagacaccacttgtatacaattacaaaacgcaagaggcaccaaaaccatgagcaaaatgagagcaatcgaagccgcagtcctggtgatgcgccgtgaaggtgtcgataccgccttcggtatcccgggcgccgcgatcaacccgctgtattcggccttgcagaaggtcggtggcatcgatcacgtccttgctcgccacgttgaaggcgcctcgcacatggccgagggctacacgcgtacaaaggccggcaatatcggcgtgtgcatcggcacctcgggcccggcgggcaccgacatggtcaccggcctttacagcgcctgggccgactcgatcccgatcctgtgcatcaccggccaggccccgcgcgcacggatgcacaaggaagacttccaggccgtcgacatcaccagcatcgtcaagccggtgaccaagtgggcgaccatggtgatggagcccggccaagtgccgtatgcgttccagaaagcctttcatgaaatgcgctccggccgccctggcccggtgctgatcgacctgccgttcgacgtgcagatggccgagatcgaattcgacatcgacgcttaccagccgctgccgctggccaagccactggccacacgcatccaggtcgaaaaagccctggccctgctggaccaggccgaacgcccgttgttggtcagcggtggcggcgtgatcaatgccgacgccagcgagctgctggtcgagtttgctgaactgaccggcattccggtcatcccgaccctgatgggctggggcaccatccccgacgatcacccgcaaatggtcggcatggtcggcctgcaaacctcccaccgttatggcaacgccacgctgctcaagtcggacgtggtactgggcatcggtaaccgctgggccaaccgccacaccggttcggtggacgtgtacaccgaagggcgcaaattcatccacgtcgacatcgagccgacgcaaatcggccgcgtgttcaccccggacctgggcatcgtctccgacgcaggttccgcactgaccatgttcattgaagtggcccgcgagtggaaagccgccggcaagctcaaggaccgcagcgcttggttgaacgactgccagcagcgcaaggccaccctgcaccgcaagacccacttcgataacgtgccggtcaaaccgcagcgcgtctatgaagagatgaaccaggtgttcggcaaagacacctgctacgtcagcaccatcggcctgtcgcagattgccggcgcgcaattcctgcacgtgtacaagccacgtcactggatcaactgcggccaggccggccccttgggctggacgattccggcagcgctcggcgtggtcaaggcggatccgacgcgcaaagtcgtggcactgtccggcgactacgacttccagttcatgatcgaagagctggccgtgggcgcgcagttcaagctgccgtacatccacgtggtggtgaacaactcctacctgggcttgatccgccaggcccagcgcggtttcgagatggactactgcgtgcagctgtccttcgacaacctcaacgccccggaactcaacggttatggcgtggaccacgtggccgttgccgaaggcctgggttgcaaggccctgcgcgtgttcgagccaagccagatagcgccggccctgcgccgcgccgaggaattgatcgaagaattcaaggttccggtgatcgttgagattattctggagcgcgtgaccaatatttccatgggcaccgagatcaacgccgtcaacgaattcgaagatctggcactggtcggcaacgatgcgccgactgccatttccctgctcgattaaggagaaccctatgccgcgttttgctgccaacctgtccatgctgtttaccgagcaggactttctcgcccgtttcaaagcggccgccgatgcgggcttccagggtgtggaatacctgttcccgtacgaattcagctccgccgagatcaaggcgcaactggacgccaacggcctgacccaagtgctgttcaacctgccggccggtgactgggccaagggcgaacgcggcctggcctgccacccggaccgggtcgaggagttccgcgccggggtcaagctggccatcgcttacgccgaggtgctgggcaatacccagatcaactgcctggcggggattcgccccgccggtgtggatgacgagaccgtggagaaaaccttcgtcgccaacctcaagtacgccgccgaaaagctgcaggcggtgggcatcaagttggtgatggagatgatcaacacccgcgacatcccgggtttttacctgaacaacacggcgcaggccctgtcgattcgcgagcaggtgggcagcgccaacttgttcctgcaatacgacatctaccacatgcaaatcatggaaggcgacctggcgcggaccatggccgcgcacctgggcgagatcaaccacatccagttggctgataaccctgggcgcaacgagccggggaccggggagatcaactatcgctttctgttcgagcatttggaccggattggctacgccggttgggtcggctgtgaatacaagccgttgaccaccacggaagcgggcttgggttggctcaaaacccacaacgcgatctaacagaacaaacacagaactaaatgtgggagctggcttgcctgcgatagcggtcattcagtcacagattcattgcctgacacaccgctatcgcaggcaagccagctcccacagtagatcttctgtgtcttggctggctgagacaggcctgcctacctaataaaaagaggattttgatcatggctaaaatcggctttatcggcaccggcatcatgggcgaacccatggccgccaacctgcagaaagcaggtcaccaactgttcctctccgagcaccacggcaaggccccgcaagccctgatcgacgcaggcgcggtggccctggccaacccgcagcaagtggcgcaggaagccgaattcatcatcgtgatggtgccggacaccccgcaggtcgatgacgtactgttccgcaaagacggcgtggccgcaggcctgtcgccaaacaaggtggtgatcgacatgagctcgatctcccctaccgccaccaaagccttcgccgcgaagatcaacgagaccggcgcgcaatacctcgatgcgccggtgtccggtggtgaggtcggtgccaaggcgggcaccttgagcatcatggtcggtggcgagccgcagaccttcgaacgcgccctgccgctgttccagagcatgggcaagaacatcaccttggtgggcagcaatggcgacggtcagacggccaaggtcgccaaccagatcatcgtcgcgctgaacatccaggcggtggccgaagcgctgctgtttgcttcgaaaaacggcgccgacccggccaaggtgcgtgaagcgctgatgggtggtttcgcttcttcgaagatcctggaagtgcacggcgagcgcatgatcaagggcacctttgatccgggcttccgcatcaacctgcaccagaaggatttgaacctggcgctggccggggccaaggagctggggatcaacctgccgaacaccgccggcacccagcaagtgttcagcacctgcaccgcgctgggcggcggcaactgggaccactcggcgctgatcaagggcctggagcatatggcgaatttttcgattcgcgataagtaacccccatttgaaatgcaggccagtgtgggagctggcttgcctgcgatagcaatctttcagttagacattcattgcctgatacaccgctatcgcaggcaagccagctcccacatgttggtcctcattccaagcttcaaacctaataacaaaaaatccccgggagcccgcttatgtcggtcgatccgcaacacctgcttcgcgagctgtttgccacagccatcgacgccgcccacccccggctcgtccttgaaccctacttgcctgccgaccgcagcggccgtgtgatcgtcatcggtgcaggcaaagccgccgccgccatggcgctggtcgtggaaaacggctggcagggcgaagtcactggcttggtagtgactcgctacggccacggcgcgccctgcaaaaaaatcgaagtggtcgaagccgcccacccggtgcccgatgccgccggtctggcggtggccaagcgcgtgctggagctgatcagcaacctgggcgaagacgaccgcgtgatcttcctgctctccggcggcggctcggccctgctggcgctgcccgccgaaggcattagcctggccgacaaacaggccgtcaacaaagccttgctcaaatccggtgcgaccattggcgaaatgaactgcgtgcgcaagcacctttccgccatcaagggcggccgactggcgaaggctgcctggccggcgaccgtctacacctacgcgatttccgacgtgccgggcgaccaggccacggtgattgcctccggccctaccgtcggcgacccaagcacctcgcaacaagccctggcaattcttaaacgctacgccatcgacgcccccgcctcggtgcgcagctggttgcaaaacccggcctcggaaaccgtcaaacccggtgacccggtcctgtctcgcagccatttccaactgatcgcccgcccgcagcaatccctcgaagccgtggccgtcaaagtccgccaggccgggttcagcccgctgatcctcggcgatctggaaggcgaagcccgcgacgtggccaaggtgcacgccggtattgcaaggcagatcgtgcaacacggccagccactcgcggcgccgtgcgtgatcctctccggcggcgaaaccaccgtgaccgtgcgcggcaatggccgtggcgggcgcaacgccgaattcctgctgagcctcaccgacagcctcaagggcctgccgggggtgtatgccttggccggtgacaccgacggcatcgacggctccgaagacaacgccggcgcgatcatgacgccgtgcagttactcgcgcgccgaagccctgggcctgtcggccagcgacgaactggacaacaacaatggctacggctacttcgccgccctcgacggtttgatcgtcacagagccgacgcgcaccaacgtcaacgacttccgcgccattctgatccttgagagctccgcacatgacgcctgacaagaaagtcaaaatcctcgccaccctgggcccggccaccgacggtatcgatgacatccgcgagctggtggaagccggggtgaatatttttcgcctcaacttcagccacggtgaccatgccgatcacgcccagcgttatcagtggattcgccaggtggagcgccagctgaattatccgctgggcatcctcatggacctgcaagggccgaagctgcgtgtcggccaatttgccgaaggcaaggtgcaactggtgcgtggccaggcgttgcgcctggacctggacccgacgccgggtgaccagtgccgggtcaacctgccccacccggaaatcatcgcggcgctggaaccgggcatggacctgctgctggacgacggcaagctgcgcctgcgcgtcatcaccaagcatgccgacgccatcgacaccacggtgctcaatggcggcgagctgtctgaccgcaaaggcgtgaacgtgccacaagcgctgctggaactcagcccgttgaccgccaaggaccgccgcgacctgagcttcggcctggagctgggtgtggactgggtggcgttgtcattcgtgcaacgcccggaagacatccgcgaggcccgcgagctgatcggcgacaaggcctttctgatggccaagatcgagaagccttccgccgtgcagcgcctacaggaaatcgccgagttgagcgacgcaatcatggtggccagaggggatctgggggtggaagtgcccgccgaaagcgtgccgcagatccagaaagacatcatcagcacctgccgccaactgggcaagccggtggtggtcgccacgcagatgctcgaatccatgcgcttctctccagcgcccacccgcgctgaggtcacggatgtggccaacgcagtcgccgaaggcgcggacgcggtgatgctgtcggcggaaaccgcctcgggcgactacccgctggaagccgtgcagatgatgagcaagatcatccgccaagtggaaaacggcccggattaccagacccagctggacgtgagcaggcccagggcggatgccacggtgtcggacgccatcagctgcgcgatccgccgtatcagcagcattttgccggtggcggtgctggtgaactacagcgaatccggcagctccagcctgcgcgcggcgcgtgagcggccggtggcgccgattctcaacctcacgccgaacctgtccacggccaggcgcttgagcgtggcgtggggcgtgcattcggtggtcaatgaccggctgcggcaagtggatgaagtgtgttccacggcgctggagattgcccaggctcaagggatggcgcagcgcggggatacgttggtgattaccgccggggtgccgttcgggcagccggggtccacgaactcgctgcgcatcgagacgttgatttagcgtctgctcgggcctcttcgcgggcaagcccgctcccacattttgatgtgtgaatacatttaaatgtgggagctggattgcctgcgattgggggcaattcggtatcactgactcacacaaaatgcacaaccaaacctgccccgactgggccgaagccctgctcaacggcttcagccaaatcttcctgcagcgccagcccctgtgcggcctgctgtgcctgctggccatcctgatcggcgccccggcgctgctcggtggcgcactgctgggcggcgtcgcgggtttgctcacggcccagcgccggggttatcccaaggccgagcgccaggccgggctgtacagctataacggcgtgctgctgggtttgttgataagccaacacttcgcctggtcggccctgctgccgccactgattctcgcgtgcggcggtttgagcgcgatcctcacgcgccaatggctgaaacacgccacccggcccgatgacttgccggcctacaccgctccgtttgtcggccttggctggttgctgatgggcacggtacccgaaagcatctttgccctggctgaacccgataccctaagcatcctcgtggcaccctttaccggcctcgcgcaaatcatgctgctggaccagcccctcgccggcgcgctgattgcgctgggcgtgctgctcgccaaccgtcgcgccgctttatgggcactgaccggcgccagcgcgggcgtgttcgttgccctgctgctggacgagcccgccagcgccctcctcggcctgcacagctataacccggcactggcggctttggcgttgagccagtcgcgccgccaaccctggctgccactgcttggcatccttttagcgatcatcctcacccccggcttttccgcgctgcacctgcccgcgctgaccgcgccgtttatccttgcctgctggctggtgcgcgccagcgggcggatgttcaaagcccgcgtggacagccggttcgaatccccctaggctctctcgatattcgattcgggcgggctttatggacagcaacaacgactggcgtcagcggctctacgtcatggttttccagagtgacacggtcgccgggcggcgctttgacggcatcttgctgctgatcatcctcgccagcatcgtgatcgtgatgctcgacagcatcgaccagatccaccagaactacgcgaacctgctggcctacatcgagtggggtttcacgctgatcttcgccatcgagtacggcttgcgcctgtattgctcgcccaaaccgttgcgctatgccttcagcttttatgggttggtggacttgctcgccatcgtgccgggcatcctcgccctgtattacagcgacgcgcagtacctgttgatcatccgcatcatccgcatgctgcggattttccgcgtgctcaagctcagcccgtacctcaagcaagccaattacctgatggccgcgttgcgcggcagcaagcagaagatcgtggtgttcctggtcagcgtttgcacgctggtgacggtgttcggcaccttgatgtacgtgatcgaaggcccggaacacggctttaccagcattcccaaaggcatctattgggccatcgtgaccctgaccaccgtaggctttggcgatatcgtgccgaagacgccgctgggccaggtgatttcgtcgctggtgatgatcaccggttactcgatcatcgccgtgcccaccgggattttcaccgccgagctggcaagcgccatgcgcggtgaacagctgcagcacgactgcccggtgtgcaagaaaaacagccatgaacccaacgcggcgttttgctcacgctgtggcaacaaccttttccgcaaactggaataagtacagagcgttttaatctttaaacgtctatgcggtgcccgttatagtcgatggcaaattgcccccactcaaccgatcaccttctcgaacaacaaggaatgagcagtgaaaaaactcgttagcgcctctctcctggccgccggccttgccctggcgggcgccgttcaggctgcccccgtcacactgctcaacgtctcttacgacgtgatgcgcgatttctacaaggactacaacgccgctttccagaagcactgggaagccgagcacccggacgacaagctgaccttgcagatgtctttcggtggctccagcaaacaagcgcgttcggtaatcgacggcctgccggctgacgtgatcaccatgaacatggccaccgacatcaacgccttggcagacaacggcaaactggtgccggacaactgggtcacccgcctgccgaacaacagcgcgccgttcacctccgcgaccgtgtttatcgtgcgcaaaggcaaccccaaggccctgaaagactggcccgacctgctcaaagacggcgtgcaagtgatcgtgcctaacccgaaaacctcgggtaacggccgctacacctacctgtcggcctggggctatgtgctgaagaacggcggcgatgaagacaaggcgaagaaattcgtcggcgagctgttcaaacacgcgccggtgctggacaccggtggccgtgctgccacaacgaccttcatgaccaaccagatcggcgacgtactggtgaccttcgagaacgaagcagaaatgatcgcccgtgaatttggccgtgatcagttcgaagtgatttacccaagcgtctcggccgaagctgagccgccggtgtcggtggtcgacaaggtggtcgagaagaaaggcacccgcgccgctgccgaggattacctgaagtacctgtggtcgccgcaaggccaggaaattgctgccaataactacctgcgcccgcgtgatccgaaagtgctggccaagtacaccgaccgcttcccgaaagtcgacttcctgtcggtggagaagacctttggtgactggcgcaccgtgcagaagacccacttcaatgatggtggggtgtttgaccagatctattcgggtcaataactgacgaaacgcagtaaaaactgtgggagctggctttcctgcgatgcaggcacctcggtgtatcaggtacaccgaggagatgctatcgcaggcaagccagctcccacatttggctctgtgttcgtcacttacatcggcggggttacgccatccttgccagccgaaatagcctgagccgtcaccgtcccatccgccgcctgggccgcaaacaacaccaccttcgtgcccaccttgagcaagctgcgatcccccggctccaggttcacaatcggcacatcatccggtactacgatcttctgctcgccgcctttgtatttgacggtcagggtgcgcccgttgctgaccaccaggtcgccgacggtgccgttggtcatgctgctgccttctttcaagtcaaacgcgcggtgcccgtcgccggtacccgccatggccgggggaaacacgtggacttccagcgccgtcagggtgccgtcggcattgggcatcgcagcggagccaatgtagctgccgggcttgatctcgtcgatcttggccagggtcacggcacgtacctgggtgtctttggtgaggtgcacggtgacgtcttcgccactgttgaccttgacgtggatcgcgtcaccgtcaaccgccgtgatggcgccgcgcacgccgacgcgcggggcttcggcggcgttggccaggccaatcgccatggcggcggcaagggttgaggccaggatcatcttgttcagcgtgattttcatgaaagtggatttcctgtttcggcagttgtggctgaatgtatcattgccgttcgacccgaaagttaacgattcagtcattaatttgcggcatgagtgatatcactgtcagcgctctaccccggccacggcgttgtctttactctgccacgccctcctccttcgctttaacgagaacaccatgaccgctacccaacacgctgcgagcaccatgacccgaggcatggtgatgctgtttgcgttctgctgcggcgccattgttgccaacatttactatgcccagccgatcatcgaattgatcgccccggacatcggcctgaccccggcgatggccagcctgatcgtatcgctgacccagatcggttatgccctgggcctgttcttcctggtgccgttgggcgacctgttggaaaaccgcaagctgatgatcaccaccaccgtggtcgcgattgcaagcttgttgggcgcagcgttcacccaacagccgaacctgtttctgctggtgtcgctgttgatcggtttcagttcagtgtcggtgcaaatcctgatcccgctggccgcgcacctggcgcccgccgagtcccgtggccgtgtggtgggcagcatcatgggcggcttgctgctgggtatcctgctggcgcggccagtgtcgagcgtggtagcggaccacttcggctggcgcgcgatgttcatggcggcggctgcgctgatggcgtttatcagtgtggtattgctgctgaccatccccaaacgtcagccggatcacagcgccagctacggccaactgctgcgctccctcggcactctgttgcgcaagcaaccggtactgcgccagcgcgcgttttaccagggctgcatgtttgccaccttcagcctgttctggaccgccgccccactggagctggcgcgtaaccacggcctgagccaaagcgagatcgcgctgtttgcgctggtaggtgccctgggcgccatcgccgcgccgatcgccggccgcctcgccgacgcaggccatacccaccgcgcttcgctgctggcgatgctgtttggcgccttgagtttcctgccggccttggtgcacccgctgtacagcgtgatcggcctggcggtgaccggcgtgatcctggacttctgcgtgcagatgaacatggtcctcggccaacgcgccatctacgccctcgacgccaacagccgcagccgcctgaacgcgctgtacatgaccagcatcttcatcggcggcgccttcggctcggcaattgccagcagcgtgtacgaacacggcggctggctgggcgtgatgctggtgggcagcgcgttcccgctggtggccttgttgcgcttcctgagtgcttcgcgccaggccgcaccggcggtggcataacgagctcttgtgggagctggcagatccagggcaagccagctcccacatggatcgcgttacgaacgcaccaacttctccaacgccgcatccgccagaaaggacgagcggcttttgaccttgtgctcgcgcacatagcggtcgatgcgctggatgacataaccgggcaaggtcacgttgaccttctcggtcttacccagatagggcgagatgtccagctccagcatgccccagcccatgcccgcgtagtcctcatgggcgtggtgattggcgactgacgttggcatcggaatcggcccaccctccgccgcgatctcctgcaacatgatgtgtgcgacttcgactgcagcgttgtacgcctcttcaaaactgtccccggcggtgactgcgcccggaatgtcagggatctgaatgccggtggcggtaaagtcatcgccccattcgatacagattgggtattgcatggatactctccttaaaactcaaacaaaccggcgcgtttcttgatgcttcgaacagtgcccaacggcaagtccttcttgggatggggtaccgggatcgtgtacgggctgtaacggtgagtgaaaatatgatgactgccggtaacccgatccagcacccaacccgcctcttgcagctccttgatcaataacctgctttgcaccccagcctccttggcttggcctgaataaaagtaactctagagttatatttactcaagcacagaatgcacgactctgatcgacggttgttttgcgggatgttgaggtggcacacctgagaactaaggagaaactagtgtgggagctggcttgcctgcgatgcaaacaactcggtctatcaggcacaccaaggtgaagctatcgcaggcaagtcagctcccacatggatttgtgggggttagatgattcggccatcccagccgactgttacgtgttgcggcaactgcgcgcgatgctgcaacaaccacgcatccagcgtatgccccacatgagtcagcacaccgagttcagcgcccacgtcctcaatactctgcaacgccaaggtcaggtcattgtgattgcgcggcgcctgcggctgcggcggcatggagcagtccagcaccagcacatctaccggtttgcgctgcagccaggcgagggtgtccggcggcaggccaacggtgtcggtgaggtaggcgatgcgccgcccttccccttcaaacaggtaacccaaggtcagtttggaatgctgcaatggcaacgccgtgacgctcagttcgccgaagtgtcgcgtctcgaatgcagcaaacggctggctgaaatccaggatgccggggtgtttgtagaggtctgaaagcccctccgggtccgccgggccgtgcaccggaatcaccagcccctggccccagcgcaggtgcagtagaccctgggcgtgatcggcgtggtagtgggtctggaaaatcccgttgaagctgcgcggtgggaagcgttcggtgaggtcgggcaagccgctgtcgatcagccagcgctggtcaacgcattcgatcaacgcgctgcacgggcggcggcgcaggtcttcgtcatggcgggccagcgtgcacgccgggcagtcacagccgtacaccgggacttgccgcgcgtcaccggtgccgagcagggtcaagcgcatgccgagtgcccgtggtccaggcagcacagcaggcgctcgacggtgtgttccagcgggccggagttgtccagcacgaacaagcccgaagcattgcccgaaatcagctcggcggtgaaacgcgcattacgcgccaggcgctggtcgatatcctccagcgactcacgccctcgcgcaatcaggcgctggtgcaacacggcttgatccaccgtcagcaacagcgccaacgaggttgggtagcgctcgcgggtctgcgccaggtgcgcgcgggagccattgaccagcacgtcctcccccgccgccagccagtcgtcgatgtcgcgcgggatgccgtaggagagcccattggcatgccagctcagggcaaacgcgccctcggcgtccatcaccgcgaactgttctgggctcacgccttgcgctgcctcgcccacggcttccgccgagcgggtgatgacgcggcgcacaatccggcagccgcgctcggccaagcgtgggcgcgcagcgtccagcaggctgtctttgcccgaaccggaaggcccgatgagatagatcaacctgcctgccatcaaaacaccctcttcgcctgtcgccagacttgttgcaccacaggaagcccttcgcggctacgggcctgtaccaggtccgcacgcaggccaacggcaatttcgccgcgatcatgcaggcccgccgcttgcgccggcgccaggctgatcatcttgaccgcccgcgacaggtcgccaccgtcctgctggtcagccagcacaaaggcggcttgcaacaggctggccgggtaatagtcgctggaaagtatatccagcaatccatcagccgccaggccagcggcggccacattacccgagtgcgacccaccgcgcaccacgttcggcgcgcccatcagtactttcatgcccagcgcctggcagccccgcgccgcttccacggtggtggggaattcggcgatggtcatgccgtagcgcgccgactcttcaacatgcgccagggtcgcgtcgtcgtggctggccactgacaacccgcgctccacgcaatgggcgacgatagccgaacggtagcggtcgctgtactccttggagttcgccatttgcagcacgatgaatgcgtccatggtttcatcgttcaggtggtacttgcccatgtagtactcacggtacttggattcgagcacgaactggcgctggcccggcgagtggtccatcaccgacaccaggcgcaccagcgggttttccaccaggtcgcggaacacgctgagggtgtcggggtggcacagctcgcagcgcaggtgcaggtggtgctcggcgcgggtcaggccggcgtcttccgccgaagcgatggcatcaagcatcgccggcagtttcttcatgcggttgcccttggggttcacgtcaccgatggacaccgcgtcgaacaccgtggtgataccggccgcaatgatctgcgcgtcatggctgagcacggccgagatcgacggccagtccacgccggggcgcggggtcatgtgtttttccaggttgtcggtgtgcagctccaccaggcccggcagcaggaaatcaccctccaggtcctgcgcctggggcaagtggctgcggccctcggcgaggtcgacgatcttcccgccacgcagcaccaccgaacccaggaacatgcgatcagccgtgacgatccgggcattactgaggatttgttcaacgggcatgggcgtattcctcttgggcaacaggcgatggggtcatgtcgaaatggcggtcggcgaccgcttcacgggcggcgcggtcgtggaagatgccgatcagcgcggcaccggccgtcttggcttcgttcatcagttccagcaccacctggcggttgttgtcatcgagggatgcggtgggttcatccagcaacatcaccggccactccaccatgaagccacgggcgatgttgacgcgctgctgctcgcccccggaaaaggtgccgggcgccagttgccacaggcgttgcggaatgttcaggcgggtcagcaggtgctcggcgcgggactgcgcattggccttcgaccagccacgcgccaacgcgggctccatcaccacgtccaggcaggcgacacgcgggatcacccgcagaaattggctgacgtaacccagcgtctgctgacgcacctgcaaaatgtcacgcggctcggcgccgaccaactccagccactcgccggcgtgctgcacacgaatgctgccgcccgccggcaggtagttgccgtacagcgtgcgcagcaaggtgcttttacccgcgcccgactggccgtgcagcaccaggcattcgccgccctgcacgctgaactccacgccgcgcagcacgttgagcaccacgccgtgttgctggtgcagggtgaaggttttcgagaggtcacggacctcgatcagagcattcgtcatggctgcaataccgaagacaccagcagttgagagtaagggtgctgtggatcgtcgagaatctggtccgtcagcccggtttccaccacatgggagcgacgcatcaccatcaggcggtcggccagcaggcgtgctacggcgaggtcgtgcgtgacgatcaccaccgccagatccagctcacgcaccagcccgcgcagcaggtcgagcaagcgtgcctgcaccgacacatcaaggccgccggtgggttcgtccataaatacaagacgcgggctcgaaacgaggttgcgggcgatttgcaggcgctgctgcatgccgcccgagaaggtgcgcggcaagtcgtcgatgcgctgcgggtcgatttccacctggcccagccaatccagcccggcgccgcgcagttgctcgtaattgcgcacgccctgggccatcaaacgctcgccgatattggccccggccgacacacccatgcgcaaaccgtcacgcgggttttgctcgacaaagccccactcggtgcgcagcaaggtgcggcgctcggcttcgctggcgctgtagaggtccagccattcgccgtccttgctgcggtagccgatgctgccggcctgcggcggcaaacgcccgctcaacagcgagagcaaggtggacttgccggagccggactcgccgacgatgcccagcacttcgccggggtaaagatcgaagctgacgccctggcaacccttctccgggccgtagagcaatgacaggtcgcgtacttgaagcaatggctggctcactggttgttctccttcacccgttgggcgcagtaccaggtgtcggaacacacgaaactctgggtgccggcatcgtcgagaatcagctcatcgaggaacgattcatggctgccgcagatggcgcagttgtgttcccacttctgcacttcgaacgggtggtcttcaaagtccaggctgtggacctgggtgtagggtggcaccgcatagaggcgcttttcacgaccggcgccaaacagcatcaacgccgggctcatgtcgagcttggggttgtcgaatttggggatgggcgacgggtccatcacgtagcgctcatcaaccatcaccgggtaggcatacgccgtggcgatatggccgaaggtggcgatgtcttcatagagttttacgtgcatcaccccgtaatcgttcagggcgtgcatggtgcgggtctcggtttccgacggctcgataaagcgcaacggctcggggatcggcacttggtagaccatgatctggcccgcctgcagcggggtttccggaacgcggtggcgggtctggatcaccgtggcatccggcgtggcctcggtggtggcaacacctgcggtgcgcgcaaaaaaacgccggatggacacggcattggtggtgtcatccgcgccctggtcgatgaccttgagcacgtcgtcatcccccaggatcgcggcggtcaattgcatgccgccggtgccccagccatagggcagcggcatctcgcggccaccgaatggcacttgatagccggggatcgccacggccttgagcaaggcgcggcggatcatgcgtttggtctgttcgtcgaggtaggcgaagttgtacgccggatcgcgcacagccggttgggtcaagtcattcatggcgggtgccctcggccggttggcgcagtttgcggatcagttccagttcggcctggaagtccacgtagtgaggcaatttgaggtgcgagacaaaacccgccgcctcgacgttgtcgcagtgggccagcacgaattcctcgcgctgggccggcgacaccacttcttcgttgtactccccggcgcgcagcgagcggtccaccagcgccatgcccatggccttgcgttcggcgtgcccgaacgccaacccatagccgcgcgtgaactgcgccagctcggtggccgagccgacgaactggttgaccatctcgcactcggtcacttcgatgctgcccaggcaaatcgggaagcccagctcttcaggatcgatccacacttccacgtcgccgatgcgaatctcaccggcaaacgggtggttgcggccgtagccgcgctgggtcgaataacccagcgccagcagaaaaccttcgtcgccacgggccagcgcttgcaggcgttcggcgcggctggccgggtactccagcgggtcgcgggtgatgtcggcgatgctggcgttgtcgtcggcctcgttcttgatcaggccttccttggcgagcaaaccgagcacccgcgggcaggcttcaatgcgagcttcaggcgtggtctgcgggccggggtattcaccttcggcgagcaaggaaaaatccagcaggcggtgggtgtagtcgaaggtcgggccgagcaactgcccgccgggcacgtccttgaacgtggccgacaggcgccggctcaaagacatttgcgaggtatcaatcggcaggctcgggctgaagcgcggcagcgtggtgcggtaggcacgcagcaggaagatggcttcaaccaaatcccccgccgcttgcttgattgccagcgcagcgagttcttcgtcgaacagcgagccttcggtcattacccgggccacggccagcggcagttgctcgcggatttgcgccacgctcagttcaggaacagcggtatcgccccggcgttttttcgccagcaggcggtgggcattgtcgatggcctgttcgccacctttgacggctacgtacatcaggcacgctcctgtgcgacacggctgctgcgcggcaggccgatcaagtgattgccggcggtgaacaacaggtccaggccacgcgggaaggcctcgcggcgttgacgttccagccagaacgcttgcggcaccggcaagtgcacctcgcgctgggccttgatgcccgggccgcgccagagccggccgcggccggcttccaggtcagtgagctgcacgatcaaagtgcaagactggtcggggtagcggtcgttgccgtggtcgaagccgctgaggtcgagcaggtcctgttcgccgagcagcgcaaacgcggcgtcttcacgcttcgtggtcagcgggcagccgcaatggaacgccaggttggcgcggatcagtggcgtgtcaaaactcggcgccagccacagcggtgtgtccatatcaagcatggccaggcacagggcgtaagtggcgggcgcgaggccgtccaggcgtggcgcggacggcaggtgttggatcaaacccggttcggccagggccttgagcgcggcgcgaaaaccgcgctgggcgtccagaaccgggtcgacgaacgccggttgcaacaggtgcgcattcatcagttttctcctcgaaccagggtgaagaactcgaccttggtggcggcggtgtcggcttctttttgcgcgcggcgggcggcttgggcgttggccagcgcggtgatcaggtcgctgagccacaggcttggctgggcgccttgcaggtgggcgtcagccagggcggccagctcggcgtgcagcttgtcgcgccctgccaggtagctgtagccagtgcggccgtcggccaggcgtaccacgcagcgggtcacgctcatttcaccgacgttgaacggcgcgccgttgccgcccatgcggccacgcaccaaggtcatgccgatttccggggcgcggatcagttggtagtcggcgtccttcaaggccgcttcatggggttgcagttcactgagttgggcgcgggcgagcacgccgatccagtgttgacgcggggacaagctcattgaggactccattcaagtcaccacttggtactggaagcgatccgaacggctggtggactgcgccagctccaccgggcggccgtcgcgatcgcaggaaagagtgaatacggtgagggccggcaagtgccgaggcatcatcagcagcgcggcttcatcacggttgggcaaacgcgcaccgatcaggctttgggtgcgggccagcggcaggtcacgctcgcgcaggtactggcgcaacgagccgccgttgtagtcggccagcaacggcgcgcggctggcgcagtagcgatggcggatcaggctgacgggctggtggtcgagcttgcgcagggtttgcagttcgatcatcggcgccatttcggcgatgcccaggtgctgggcttcgtcgcggctggcgtagcagtagcggcgtttgagcaacaccgcctgcacgccgacaccctgggccgacagcgactggctgtaggaggtctcggcgcccatcgaataaatcagcgggcggtcgagtacctgggtgcccttgccctggcggcgcaacaggctgccttcgaacaccagctcgtcgatggcgcggcgcagggtgtggcggttcacgccgaagcgctcggccatgtgcacctcgccgggcaggaagtcgccggcgctgtagctgctcagttcgcggcgcaaaatatccgcaagttcgcggtacaccggctcatcttgtctagacaactgcatgcttaaaaaaagcgcctcgcgggcacccctccggcgtcagatgaactgcttgcgcaggcgttgggacagcacgtcgatacagctcaccaccacgatgatcaccagcagcaccgcgcaggtttggacgaactggaaggcgcggatgttttcccagaggatcacgccgataccgcccgcaccgaccatcccgaccaccgtggcggaacgcacgttggcttcgaagcggtagagcgcgtagctcacccacagcggcatcacttgggggatcacgccgtagatcacttcctgcaaggcgctggcgccggtggcgcgcacaccctcaaccgggcccgggtcgatggcttcgacggcttcggcaaacagcttggcgagcacgccggtggtgctgatccacagggccagaacgccggcaaaaggaccgaggccgacggcgaccacgaacagcatcgcgaagaccatttcattgatggaacggaaggcatccatcacacggcgcaggggttggtggatccaccacggggtgatgttttcagagcaaaggatgcccagcggcaccgagcagacgatcgccaacaccgtgccccagagggcgatttgcacggtgacgatcatctcggtgaggtaggagcgccattcgtggaagtccggcgggaagaagtcggcggcgaaggtcgccatgttgccggagtcacggtacagcgccagcgggttcatctcagcaccgcgccaggcccaggccagcaggagcaggaacaggccccagccgaggtactgcggccaagtgcgtttgccgacggcttcagcgtgcaaggttgtcattggatcgcctcaatctaagtgtgggagcaaggtttatgtgggagccgggcttgcccgcgatagaatcgactcggttttactgtcagaccgagttgcctgcatcgcgggcaagcccggctcccacaaaagccagggcccacaggggttagccgtttgctgcagttttcttgtcgagctcggagatgcgctgttgcagcttcgccaggtcagcgtcgatgtcagccagcttcttggccttgtcggccgcttccaggtggtcatccgcgctgatggtggtgcgctgcttgaacagttccagttggcggatcggcagcagttggtcgtcgttcgaggccaggaacttgccgagctgcatgttcttcagcaccgctttctcttcatcggtgttgccgtagttggcgaagaaatcacggatcttggtcttctcgctgtcgctcagcgccttgctccacaccatcgggtcagccgggatcagcggcgatttccagatcaccttgagcatggcggccttgtccggctgggtgacttcaaggcggtcccagctttcggtgttgaaggtggccacgtccaactgacctttggccacgctcaaggcgttcacttcatggctggagttgagggtgcgtttgaacgcggtggcggcgtccacatggtttttggcgaacacgtagtagcccggtaccaggtagcccgaggtggagttcgggtcaccgttgccgaaggtcaggttcttggcgttcttgagcatgtcgtcgacgttgttgatcgggctgtccttgcgcacgatcagcacgctccagtaaccggcggcgccgttggcggcggcggtctgggcgaagatttcgccgttggaacggtccaccgcttccatcgccgccttgttgcccagccaggccacgtcgaccttgttgaagcgcatgccctggatcaggccggcgtagtcagaggcgaaggtagcgttgatggtcaggccggtcttcttgtgcatgtcatccagaaacggctgccagatgctcttgaggttctgcgaagactcggtggacatgatgccgaagttgatggctttatccgccgcataggcattgcccatcgcgacactggccaacaaggcggcagacaaaaacacgtggccgatacggttcaacatggaaggcgttcctgtgggtcgtgagtagggtttcaagcgcgcgccagggccagccggggcatggcttcggcgtggcgggtctggtcggaaaacatcaggctggtgtcgacgtcggcaccgtacaaatcgttgaggaactggctgctcatggcgctgccctgcccgtcgaaatgaatgcggccacctttaagggccacagcacgcgggcaataacgcatggcgtaatcgacttgatgcagggtcaccaccacggtcttgccgtcgcggcggttgatgtcggcgaggatctccatgaccttgcgcgccgactccgggtccagcgaggcgatcggctcgtcggcgagaatcacttcggcgcgctgggtcaaagcgcgggcaatcgccacacgctgctgctggccgccggacaaagtagaagcgcgctgcccggccaggtcagccaggccgacgcgagccagggattcgagggcaaaggccttttcctcggcattgaacagccccaggttgccacgccagcgcggcatgcggcccaggcagccgagcagcacgttgtcgagcacgctcaggcggttgaccaggttgaactgctggaagatgtagccgatgtccgcacgcaaccgccgcaccttgccattcaaccttccactggcctgcacctcccggcccagcaccttgatgctgccgccgttgctcttgtcgcaacaggccaggccagccaaatggcgcaacaacgtggacttgcccgacccggaagcgccaatcagcgcgaccatctcaccggcagcaatggtgagttcgaggtcgaccagtgcggatttcttcgcaaaggtcttgttcaagtgatcgacatgaatagcgtgagtcatgggcttctctgtcttgtttgaacagccacggggtggctgcgtttgagttcaaacgacagtaggcgcgccaagtgtcagtgctattacttgcacatgactggcgggcggcgctttgatgaaggttttgtgaaaggttggaattgggtagccagtggtctgcggcgaagacgtctggcacaatctgcgccactaattagccattactggatggcctccccgcaggtttaaggaaaaacacgcatgttcacagacaacctccatttgggcgccccttaccgattgctcgggatgacgttggccagcctgttgctcgccggctgttcccaggccggcccacagcccaccgcccagcgtgatcactgcctggaaaagggccctgcgaacagcgaggccttcgagcggtgcgcagcagaccgggaagcgcagaaagccaaaatgctcaaggaggtcctcgccgtgctcgacacgaccccgggtcggcaacccttggccgatacgggtccggacggttatacgcaggccgatttcccgcaaaccccaaaagtcttgaactacgagggcgaacgctcaatctcggtggttgaaaaacaggcgctgccttacaaagtcaggatcatctggaaatacgactcgccttaccctgtgcctggcgcgggtgacgtctacaggatgggccagatgcgccggcaggtcgtgccggccgtggaggcgcaagggctcgcgaagtttgtgtgcacggtgacagctgaccagcaggtgcaatggattttctatgccaaaagtgaagagacgtttatggcgcaagtgaatgccgcactggccaagagcgacccttaccccctgctgtttacggcgactaaagagcccgcgctgagtagcgaaatggccggggcggatagtctgcgtatcacgcccaaaacctgtatggaataacggtcacaccctttcagccccttgtaggaattggcgtgccagcgatagcggtgtgtcagccacgcggttgccagcaggactgccgtcatcgccggcaagccggctcctacagggggtgtgcgttggcttcgcgggcgcgcagtcgcggggtgacgaagtccaggaatgcgcgcacttttaatggcagcggggcctggcctttgtgcaccaggttgatgggcaatgcagtcgactcatagggctgcagcagcacctgcaaatcacccttttgcagcgcatccgccacttggtacgacaacacccgaatcatgccaacgcccagcgtcgccgctgcaatcgccgcttctgccgtgttcaccgacagccgagaatgcacgggcacggtctgctccaatttgccgcttccaaatacccaggcgcccaccgaggcgagcacgtcgaaggtgatgcaactgtgatccgccagatcctgtggcctggccggttcgccgtgagttttcaggtagcgggggctggcgcacaccacgcgccgcaccgtgcccacgggcaccgccttgagcgagctgtcgggcaattcaccaatgcgcacggccacgtcacactgctcttccatcaaatgcactacgcggtcggtgagcatcaggttgacgctgatctcggggtattgcgccaaaaattccgccaccaccggcacgatgtgcaggcgcccgaagacgataggcgcggtcaccaccaactcgcccttgggctgcgcgtattcaccggtggccgcgcgctcggcttcgccgatctcttcgagaatgcgccggcaggccgtcaggtaggaagcccctacgtcggtcaacgacagttgccgcgtggtgcggtgcaacagccgtgatttcagatgagcctccagctccgccaccttgcggctgacggtggccaagggcatgtcgagctggcgagcagcggccgacaagctgcccgcttccaccactgcgacaaacacggacatcgactcaagacggttcatggcgccctatcaaattatggaaggatgattcccgatcctaggggattatcgacataaaggcgactgcgtaaggttggccactcttcccctgcccctaaggagcgcgccatgagcacagccgagagtcacccgccgcgaggcaagatcatcatgatggcggtgatcgccggggcggtggtcaccaacatctattgcacccagccggtgctgccgctgattgcttcggacatgggcgtggcggtgtcgacggtcaacctggtggcgggcgcggcactgctggggtttgccaccggcctggccctgttgctgccgatgggcgaccgttttgaccggcgcaaactggtgctgggccagatcgcgttggcgttctgctttgcactggcggcagcatttgcgccgagcatctgggcgctgatcggcgcgtcattcggcttgggtatcgtgtgttgcgtgccgcaacaactggtgccgtttgcggcggtgatgtcccagccccatgagcgcgggcgcaacgtgggcacggtggtcagcgggatcatgctggggattttgctcgggcgcaccatcagcggcgtggtcggtgaggcgtatggctggcgcgcggtgtacggcatggaagccgccttcatgattccggtgtggttgatcgcagccaaactgttgccgcctggggtgccgagcagcacgttgtcctaccctcgcctgctggcttcactgtggccgttgatgcgcgataacagcccgatccgtcaatcgatgatggtgcaggccttgttgtgggcatgcttcaacgcgttttgggtgaacctggccgggttgctcgccaatgggccatggcaactgggcagcgcctgggccggcggcttcgggattatcggtgcggtgggcgcgttcgcggcgtcgtacggtgggcgcgcggcggacaaggtgggttgccgcaaggtgatcggggccagtgtcggcattgtgacgttgtcgtttgtgttactggccggagcgcagacctcactgatcttgctggttttgggagtgatcgtgctggatatcggggtgcaagcgggactcgtggcgaaccagacccgcgcgtttgcggtggacccgaaggcgcaggggcggatcaacagtttgtacatgaccgcgacgtttgtgggcggggcggtgggggcgacggtgagtgggtggttgatggcgcagtttggctgggtgggaattgtggcgtttggggtggtgttgggggtgttggccggggtgattcattggctgggtgcgccgcgcgagcttcgggaactggcataagtccctgatcacatggagatcaaaactgtgggagctggcttgcctgcgatgcgggcaccttgatgtatcaggctcaccgcggtgatgccatcgcaggcaagccagctcccacacaagcctgttcccacaggtgacggcatttgaattcgggaataaaaaaggcgacctgtagaggtcgccttttttcattgtgcgtattgcttgctcaaccccggcggcacgccttgcacattggtctcttcccacggcccattcgggctgatcgaacggctccagccattgctccagcggtaataggtacgctggcggtagaaggtgtcgggctgttcttccagcacatacacctgcattttgccgtcccagtggctggcggcgcccggtggtggggcgaaggtgggcgaggagctgggcacgggtttgggcggtgtgaccgggccggaaggtttggtgctcggctgggtcgacgggcctgacggcgggatggtcggcccggttgggccaggaggtggccggtggaccgcacaagcgctcaggccgagtacaaggctgagcagggtgatgcgtgcaaatgcggtcatgggcgtttcctcgatttacttgtccggactgtcgatggtcagctgctgcagcgcagtggtgctgctggccaagggttggctgcggccgatccactcgccagtggtcggctgaccggcccgggatatgcgcgcaaccagttggacttcggggaagttcgacagtttcaactgcggcatcattgcatcgctatcgcccagttcgacggtgattggcagctgggcgacggtgacgcgcttggccgccagcggtgccggtgggccgttcaccgcacgggcgaagatgaacacgctgtcgctcggcaaggccttggccttcacgtcagcgctcaggtccacacgcactgtcatcgcggatttttgaggcgcgacggtgccgccactttccttgagtttctcggccgcgcggtcaataccgccttgcagcgctgcgcgagagttgtcatccggtggcagttgggccagcaggcggttccagtagtcgatcgcttcctggtaacgctgcccttcaaaggcggcgatacccagcaagccgaggctggtgacttccttcggatcaagcttcaacgcttcgtccgtcagcgcctgcaccttgggcgaccactgtttgttgtcggcaaaatactgcgcctgcgcccactggccaagcagttccggctggcgaccggccagggccacggtgcgttcgaagatctttgccgcatcggcggaacggtcttgagccatgtaggcgcgaccgaggaagtacaggccttccggcgagtccggctgggcggcggcggcgcgttccaggcggcgggtcatgtcttccatggacaccggcggctgggagaattcgcgggtcagctcgaccttgtcgctggcgccgtaatgcaggtacagcgctacaccgagcaccggcaccagaaacgccgccaacaagggcaagggtttgcccaggcgcgattcgcggggtttttccacaccttcggtgtcggcgagcaattcgcgggccgcttcggcgcggccggtgtcgagttgcgcggggttcagcacgccttcgtcctgctgcacttgcaactcggcgacgcgttcttgatacagcgccacgttcagcgcagtgcggtcctcttcgcgctgggcacggcggtcgcgcaacacaggaatcaacaggaaactcagggcaatcaggagcagcaaccctgctgcgagccaaaaatcaatcatcagtcttggtgtccagcaattggtcgaggcgtttgcgctcgtcaggggatagcgcgtcggaaccatcagtcggcgcggcgcggcggcggcgtacgatcacggccatcaccaccacaccggtcagcaacagcccggcggggccgaaccagagcagcgcggtcttgccggtgagggccggtttgtagcgcacgaaatcaccgtagcggtcgaccatgaaatcgatgatctgctggttgtccttgccctcccccaacatgcggaagatctctttgcgcaagtcggcggcgatgggggcgttggagtcggcgatgtcctggttctggcatttggggcagcgcagctccttggtcaactcgcggaaacgctcacggtcaccctctttggcgaattcgtaggtatcgatggcggcgtgggccacaccgaccagacccagcgccagcacagcagcggctaacagacgcttcatggcttggcctcgtcgaccagcgcctggtatttggcggccagttgttcgcgccagaccacttcatcgatcacgccgacgtacttgtcgcggatcacacctttggcgtcgatgaagaaggtttccggggcgccgtacacgccgaggttcaggcccaggttgccgtcttcgtcgcggatatccagctggtacgggttgtggaactccgccagccatttcagcgcggcggcgttgtcgtccttgtagttaatgccgtaaatcaccacgccctgctcggccagtttgttcagcaccgggtgttcaacgcggcaggaaatgcaccaggtgccccacacgttgaccagcgccggtttgcccaacaaatccgcttgggtcagggtcttgtcgccctgcaccgtcggcaggctgaaggccgggaattgcttgccgatcattgccgagggcaactcggccgggtccaggtacaagccgcgatacaggaacactgccaccaccagaaacgccgccagcggcactaccatcaaccaacgcttcatactggcgctccttgcaggccgagggcttcgcgcacccggcttttcaccttgacccgatagcgccggtccagcgcggccaacaaaccaccgaaaccggtgagcaggccgccgaaccagatccagcgcacaaacggtttcacatgcacgcgcaccgcccaggcgccgtcgcccaagggttcacccagcgctacgtaaaggtcacgggtgaaaccggcgtcgatgcccgcctcggtcatcattgaactttgcacggtgtacaggcgtttttccgggtgcagcacggccacctccttgccgttgcgcacgacgcgcacggtgcctttgtccgaggtgaagttcgggccttcaaagtgtttggcaccctcgaaaatgaagtggtaaccggccaggtccatggactcacccggcgccaggcgcaggtcgcgctcggcgctgttctggctggacagcaccacgcccagggcgcacacggcgatgccgatatgcgcaatttgcatgccccagtagctgcgggtcaggcttggcaggcctttgatcaggcccttgtggcgggtcttgtcgaagatgtcacgcacaccggccagcaacacccaggcggcgagcaggaaggtcgcgaggactgcccagttgaaatcgccataagcgaacccggcgatcaccgccaacgccacgctgcccagcagcaccggcatcagcatgcccgccagccatttcaccggggtgtctttccagcgcaccagcatgccgacggccatcaccaccatcaacaggcccatcagcgggatgaacaacgcgttgaaatacggcgggccgacggacagcttggcgccgctcagcgcatccagcaccaagggatacagggtgccgagcaggatcatcgacgcggccaccaccagcaccaggttgttgcccagcaacagggtttcccgcgaccacaggttgaagccgacctggctcttgaccacgggcgcgcgcagggcgaacaaggtcagggagccgccgaccacaaacagcaggaagatcagaatgaacacgccgcgctccgggtcggaggcgaacgcatgcaccgaggtcaacacgccagagcgcacgaggaaggtgccgagcaggctgagggaaaatgcagcgatggccagcaacaccgtccagcttttgaacacgccgcgtttttcggtgacggccagcgagtgaatcaacgcagtaccgaccagccagggcatgaacgaggcgttttccaccgggtcccagaaccaccagccaccccagccgagttcgtagtaggcccaccacgaacccaaggtgatgccgatgccgaggaaggcccaggcgacaatggtccatggccgcgaccagcgcgcccaggccgcatcgaggcgcccaccgagcaaggccgcgatggcaaaggcgaaggccacggagaaacccacgtaccccatgtagagcatcggcgggtgcacgatcaggccgatgtcttgcagcagggggttgaggtcgtgcccgtccaccgggatctgcggcaggatgcgggtaaaggggttggaggtcatgatcaggaacagcaggaagccgatgctgatcatgcccatcaccgccaatacacgggccagcatcacttgcggcagttggcgcgagaacaccgacacggcgaaggtccagccgccgaggatcaaggcccacagcagcaatgaaccttcgtgggcaccccataccgcgctgaacttgtagtaccagggcaaggcgctgttggagttattggcgacgtaggcgacggaaaagtcgtcggtcatgaaggcgtaggtcagacagccaaacgcgaagaccagaaacgcaaactggccccaggcagccggctgcgccaggctcatccacaggcggtcaccgcgccaggcgccgagcaacggcaccacggcctgcaccacggcaaaacacagggcgaggatcatcgccaactggcccaactcgggaataaacagtgctgaggtcatggcttagccctccttggctggggtcggggcagtttggccgctgtctttcaacgccttggtgacttccggcggcatgtatttttcgtcgtgcttggccagcacttcatcggccaccaccacaccgtcggcgttgagcttgcccagggcgacgatgccctggccttcgcggaacaggtccgggaggatgccgcggtaggtgatggtcacggctttgttgaagtcggtgaccacgaaggtcacgtcgagggagtcggacgaacgtttcagcgagcccttctccaccatgccgccggcgcggatgcgcgtgcccaccggggcttcgccgctggcgatttgcgtcggggtgtagaacaggttgatgttctcccgcagggcgctcatcgccagggccacggcaatactcacaccggccagaatggccaggatgatcaacagacgctttctacgcagcggattcacttatcgctctcccggcgcaaacggcgcgcctcttgttgcaggtaacgcttgcgggccaggatcggcgcggcgacgttgagggccagcaccgtcaggcagatgccataggccgtccagacatacaggccgtgatggcccatggcgagaaaatcactgaatgacgcaaagctcatccacgggctcccaggcaggtttgcacttcggccttgacccagctggcgcgggcttcacgcttgagcacttcaaggcgcatgcgcatcagcagcacggcgccgaagaagcaatagaaccccagcaccatcagcagcagcggcgcccacatttccacgggcatcgccggtttttcggtgagggtgaaggtggcaccctggtgcagggtgttccaccactccaccgagtatttgatgatcgggatgttgatcacgccgacgatggccaatacggcgcaggccttggcggcgctgtcgcggttgctgatggcattgcccagtgcgatcaggccgaagtacaggaacagcaggatcagcatggaggtgaggcgcgcgtcccatacccaccacgaaccccaggtcggcttgccccagatggcgcccgtaaccagtgccacggcggtcatccaggcgccgatgggcgcggcgcattgcagggcgacgtcggcgattttcatcttccagaccaggccaaccacgccgcacacggccatcatcacgtagcaggactgggccagcatggcggcgggcacgtggatatagatgatgcgaaagctgttgccttgctggtagtccggcggcgcaaaggccaggccccagaccaggccgatgccgatcagcaaaatggcagcgatgctcagccacggcagcagcttgccgctgatgccgtaaaaccatttgggcgagccgagcttgtgaaaccaggtccagttcattgctgtttccatcacggtggcctcctgtcttggcaggaggctctcagggtctttactggctaagacataacgcttggccagacctcattattcgccgacgctgatcttcaggccagccgctatagcaaagggtgtcagggttaccgccagggcggtcaggctgccaagccacaggaggtaaccggtcgccggcatgcccatgagcgcggcctgcaaggcgccgctgcccaggatcaacaccgggatgtacaaaggcaaaatcagcagggccagcaacaggccgccccgtttcaaaccgacggtcaacgctgcgcccaccgcccccaacaggctgagcaccggcgtaccgagcaacaaagacaggagcaacacgggcaggcattcaaacggcaagcccagcatcattgccaacagcggcgagagcaagactagcgccaagccggaaaaaacccagtgtgccagcaccttggccagtaccagaagtggcaaagggtgcgacgaaaggacccactgttcaagggaaccgtcttcgaaatcactgcgaaacagcccgtccagcgagagcagaaccgataaaagcgcggccacccacaccagtcccggggacaaggtttgcaacagtttagtctcggggccgaccgccagcgggaacagggcgatgacgatggcgaagaataccagcgggttggccagctcggccgggcgacggcacaacagccgcgcttcgcgggcgaccaacagggcgaagacactcatgccgaccaccgccctaaatccaggtcgcggtagccggcaggcatgcgcgccagcgtgtggtgagtggtgaggacgaccagcccgccgctctcgcagtgccgggccaggtgttcttcgagctgggccacgccttgtttgtcgagggcggtgaacggttcgtcgagaatccacagcggcgggccgggcagatacaaacgcgccagggccactcgacgctgctggccggcggacagggtgtggcagggaacgtcttcaaaccccttgaggccaacggcgcccagcgcttgccagatggcgtcacgggaagccgggtgatgcagggcgctgagccagctgaggttttcttcgggggtcagtacgtctttgatacctgcggcgtggccgatccagatcaggttgcgtgcaagttcggtgcgctgctcgctcaagggtttgccgttgagtcgcacctcaccggccgtcggctgcatcaacccggccagcaggcgcagcaaactggtcttgccgctgccattggggccgctgacttgcaccatgtcgccgcccgtcagccgcagttcgaggtgctcgaacagcaggcgcaggtcgcgttcacaggagagcgctacggcttcaagaagagggctggtcaaaagatcgcgggcctttacggttcaagtcggcggtgcagcagccgttatagagaaaagcacaataacggctttagcgaccgattttagagagctggatcaaatagttgtgaggtttttaccgctctctttgcagacgggcggcattatacatgtgatgccctactctaaagagggcaatttcccccgagacgacgcgcacgatgaccggtgagatcaaccttcctacgctgccacccgccccggcacccgggcctgccccgctgccgccgaccggcgagctgctcaaactgctggaaccgcagacgggcttgatcgacccgggaaaaaccgtaaacgccgaggtcatcgcgcttaaacagggcggcgatgcctttcagttgttgctcaagctgaccctcgaaggaggccgccagacgctggttcaggccagcagcgcccagccgttgccactgggcagcaatgtggcagtcagccagacgcccaccggcaacctgaccatcagcctgcagcaagccttgagcgccaacgtggccgccctcacccgcatcgacaccacgcaaatgccggtgggcacgctgttgcaagccaaggtgctgaccacccagatgctgcctcagggcaccacgcagccggcgatctaccgctcgttggtgaccgtgttgaccaatgccatggccggcgcgacgctgaccgtcgaaagcccgcaaccgctgcgtgtcggcagcttgctcagtgccgtggtacagaatgcgcagaccctgaatttcgtgccgttgagcggccggcaggatcagctggcggtgagccaacagttggccacccagcaaagccgccaaggctcactggacgccgtgttcaccgccatccaaaacctgcccgccgacgacaccacctccgccgacctgcgcgccgccgccgaccgcttgctcgccgccctgcctgacctggcccaggtgagcaacccgaagatgctggcgcaagtgatccagaacagcggcgcgtttcttgaagccaaattactcgtcgggcaaaacccgcagataccgccgctggacatgaaaggcgcgctgctgcgcctggtcgcggacttgttgcccgccctgcccgccggcaccaacctgaatgccattcttgctgcgaataccctggcccaggtgttgcccaactttgtgcgtaacccgttgagcacactgggccagatcagcgcccgcccggcgccagcaggtttcccgctgcccgatcggttgatggcaaaactcgaaggcgaaggcgacctggaaaacctgctgcgcttggccgccgccgcgatttcccgcctgcaaagccaccagttgtcgagcctggaacaaaccggcaccaccgccgacggccgcctgcaaaccacctggcaactggaaatccccatgcgcaccttgcaggacatcgtgccgctgcaggtcaaattccaacgcgaggagccggcgccggacaaggaccagcccgaacgcaaaacccagaaagaccccaagcagatgctctggcgcgtcgaactggccttcgacatggagccgctggggccattgcaggttcaggcgcaattgacccagggcaaactctccagccagctgtgggcgacacgggcgtttaccgccagcctgatcgaaagccacttgggcagcctgcgcgaacggttggtgacctcgggcatcaatgtgggcgacctggattgccacctcggcacaccgccgcgcgggccgagaaccgggctggagcaacgctgggtggatgaaaccgcatgaagaaccaaagcccgccgcgccaagccattgctctcaaatacgacggccagcaagcgcccaccctgaccgccaagggcgacgatgccctggccgaagccattttgaagctggcacgggaaaatgaagtgccgatctatgagaatgccgagctggtgaagctactggcgcgcatggaattgggggacagcattccggaggagttgtaccgcacggtggcggagattattgcgtttgcgtggacgctcaaaggcaagtttccggtggggtatgacccgaatgccgagccggtggagcgcgacgtcaccgagcgtggcgacgattactgagccctacaaataacccaaatgtgggagctggcttgcctgcgatggcatctcctcggtgtacctgatacaccgaggtgcctgcatcgcaggcaagccagctcccacaaaagccagctcccacatttagagctctattgtcagttgaggacttcactgagcgggatgaagttgacccggtcgccaacatcgagcgtcgtgccttccaacacctccacaaacccctccgcccacgccgcgctgcgcagcacgccggagctctggttgcggtagatgatcgccttgccctgctcgatccgcccgcgcaggtactcgcgacggttgcccggtttgggccatacgaaccccaccggcacttcgaagcgcagcggctccacctccgccacaccctggcggcgcagtagatacggccgcgcgagcagcgcaaaggtcaccaaggtcgaagccgggttgccgggcaggccgatcaccggcacgccacggaaatggccgaaggtcaggggcttgccgggtttgatcgccagtttccacagcgccagctcgccctcttcgcgcagggcgatgccaaggaagtccgcctcacccaccgacactccgccggtggacaggatcaagtcggcatctcccaatcccgccagccgtgtgcgggtcttttccaggtcatccggcagaatgcccgcatcgatcacttcacagcccatgcgcgtcagccaggagcagagcacgcggcggttgctgttgtagatctgcccggggcccagcggcaggccgggttcgatcagctcatcgccagtggacagcacggccacccgcacgcggcgcaccacgttcaggcggtcatgacccagtgaggcggcgaggcccagttcaatcgggcccaagcgggtgccggcgttcagcaccaactcgccgacggtggtttcctggccctgcgggcggatgttttgatccacctgtaacggctcggtaaaactcacgcgctcatccgcgtgaaccacggcgttttcctgcatctctacacagtccgcgccttcgggcaccggcgcgccggtaaagatgcgcgcacaggtaccggcggccagcggctgcggcgcctggccggcgaaaatgcgctggctgacgggcagcggctcgccggtccaatccgccaggcgcaacgcgtaaccgtccatggcgctgttgggccagggcggcaggtcgagggtggagaccagatcctgcgccagcacgcggccatcgcagtcggccagcgccagggtttcctgctcgcggatcggcgcggcttcggccatgtccagcaactgattgagcgcttgttcgaccggcatcaacgcaccggttttgccgggcttatccacggctttcgcagggttcggcctgcttcaagtgaggcacgaaattgcacgggcggtgacggttgtcgagttgctcggcgaggatgccgtcccaaccggtgcgcacggcattggtggaacccggcaggcagcacaccagcgtgccattggccaggccggccaaagcgcgggactgcacggtggaggtgccgatatcggccacggaaatctggcggaacagttcgccgaagccatcgacctgtttgtccagcaggcaactcacggcttccggcgtgctgtcacggccggtgaaaccggtgccgccggtgatcagcaccacttgcaccacgtcttcagcgatccagtgggccacttgggcgcggatcttgtagaggtcgtccttgagcagcacgcgctcggcaaggttgtggccggccgcggtgaggcggtcgacgaaggtctgcccggaggtatcggtgtcgagggtacgggtgtcgctgacggtcagtacagcaatgttcaggggtacgaagggcgcatctgccttggctttcatggcacggtccggttgtcgaaggaacagcccgatgttatatcacagggccctgtttacctgccgctgcggaaccgccatgtctctcgattcttcgcttttgccttgttcgattttgctgctggccggtggtcgtggccagcgcatgggtggccaggataaaggcctgctgccgtggcacggcgagcctctgattgcgcatttgcaccgcctgacgcggccacagacggatgacctgatcatctcgtgcaaccgcaaccatgacatttacgcgccctatgccgaccagttggtgagcgatgacagcccggactttcccgggccgctggcaggcatccgtgccggactggcggcggcgtgccatgagcatttgctggtgctgccatgtgacgtgccgaatatcgacgcgcaactgcttgctgaactggttaaaactgcacaacgcaaaccgcaggtgccactgatggtgcgccatggcgaattttgggaaccgctgatctgcatcattcccacccgcttgcgaagcgaggtggaaaaggcatgggaagccggcgaacgcagcccgcgcaaaatattcctgcaactgggcggcgtgggcctggaatgcccggcaaacgacccgcgcctggcgaacctgaatacacccgagctgttacagcagaggtccgacgtggcagaatgaaccttcgtacatggaactttggcgacgtcccacacgtcacaaggtcagcactcaaaaaagcattctctcggagacaaactcatgactcaacggaccatcgccgctctcatgcttgcactgggcctcgccaccctcgccggttgcgcctcgcctacagtgatcaccctgaatgacggtcgcgaaatccaggccgtcgacacccctaaatacgacaaggcttcgggcttctacgagttcgaacaactggacggcaagcagacccgcatcaacaaggatcaggttcgcaccgttaaagacctgtaagtcttgacgctggacccacaaggcccgcctcgcgcgggccttgtcgtttccggggtttaccagtcgagggtaatgtggctgcgaaaactgcgttcttcgcctgtaaccgggtcgataaaacgcacgccctgggccaacagtttgagtgggttggcgtagtcgtcttcgacgtccttgagcacgtcggggtagaaagggtcattgcagatactcgcccccaacgcggtcatgtgcacacgcaactggtgcttcttgcccgtcaccgggaacaggccgtaacgccataaatcgccgtttttttcgcgcacttccaccgccgtttcagtgttgctggcgccgggcccctcttgcattcggaagaacggctcgccatccaccagacggcttttgtgcaccctgggaaacgtcagctcaggcaaggcgggggcgatggcctcgtagaatttgtcgatacgtcgcgtgggaaacagctgttgatacgccgagcgagtggccgggttggccgaaaacagcaccagaccagcagtgtgccggtctattcggtgcagggggaccagcgaagggttatcgaaacggcgaatcaggcggcgcagcaaggtttgctcgacgtactcaccggccggcgtcaccggcagaaaatgcggtttgtctgcgaccaccagatgctcatcggcgtacaggatggtttcctgcacggggatcaccttttcattcggcacttcgcgaaagtaataaacgcacaggccttccttgtaggccagggccaggctgatcggattgccgttgatatccagaacgcggcctcgggcaatgcggtccagccagtgttcgcggctgatggccggaaaatgctcacacaggcagtccagcacagtcgcccaagggccaggtggcaaatacaaagtactggcttggtaccgggacgcggaaaaaccggaagtggacatgaaatgctcgaagcctgaaaaacaggcgggcattatcccgcatcaagcgggatgcagcctagggcggatctcaggccttggccaattgcgtgcgcaggaccggcgaggcactggccgcctcggtgaactccttgagccagcgcaacacgtccaccgcttcccagcggcccggatcgtacaaggcgtacaacaaaccctggtaacccactacatccagctgtttgtgataaccggcgcgttggaacaacgcttcgatttcggcgaagcaggtgttgaagtgcactttgttaaacggcgtcttgccttccgtgaccaggccgtcgaggcgcagctcgttcaccgcgtcgcgcacgacgtcggcggacatgcgattgacgctgcttttcagttgttcaacattcaccacgggcgttccctctattcaatcgctgtacaaacatacagtaacgtaatatttggaaacccgctatcggataaagcttaacgaaggaaggcaaccacctgctcggcatcgaagggccagtccagctccgccccggtatccacccggcgaagtaccggaattcgcaggccgtaagcctcagtcagatcatcggggtcggtaatatccaccagttccaccaacaacccatgctcgaccaacggcataaggacggcctcggcaacttcgcaaagatggcaacccagggtgccgaacagctggcattcaggaggcatggctaagagacccgatcagaagtaggtgatcattctaagcctgccaaattcccgtggcgagccgatcaatcctggctgacggcgccaatcttgtggatggacaggtctgcgccgtaatactcctgctcctggctcagacgcagcccgtgcacgcgcttgatcacgccgtacaccagcagcccgccgatcaatgccaccgccacgccgagagcggtgccgatgagttggctgatcaggctgaccccacccaggccgcctagtgcggtctgaccgaaaatgccacaggcgatgccgccccacacgccacacaggccatgcagtggccacacacccagcacgtcatcgattttccagcgatcctgggcggcgataaaaaaccacacgaacaaaccgccagcgaccacgcctgtcaccagcgcgccgaccgggtgcatcaggtcggacccggcgcaaatcgccaccagcccggccaatggaccgttatgcaggaagcccgggtcattgcggccaataatcagcgcagcaacggtgccgcccaccatggccatcagcgagttgactgccaccagaccgctgacgccattcagtgtttgcgcgctcattacgttgaagccaaaccagccgacaatcaaaatccacgagcccaacgcgaggaacggaatgctcgagggggcgaacgccaccaaacgcccttcccggtagcgcccgttacgcggcccaagcaacagcaccgccgccagcgccagccagccgcccatggcgtgcacgaccacggaaccggcgaagtcatggaagctggcaccaaacttcgccagcagccaggcttgcaggccgaagttgccgttccacaccatgccttcgaaaaacggatagataaacgccacgatcaacgcagtggcgcacagctgcggagcaaactttgcacgctcggcaatgcccccggaaatgatcgccgggatcgcagcggcaaacgtcagcaagaaaaagaatttcaccagcccgtagccgtgatcggcgctgatgaccgccgccggctgcaggaagctcacgccgtaagagatccaatagcctataaagaagtaggccaatgtggagatggcgaagtcgctgagtattttcgacagtgcgttgacctggtttttctggcgtacggtgccgacctccagaaacgcgaagccggcatgcatggccaggaccatgaccgcaccgatcagaataaagagggtgttggaactgtggacaagggtgtccaccgcactttgcaaattttccatggaggttggcaggcctgcattaaaggcaaaaagcaccaaagcggttcaagccagtgttgtgcgcactaaattggcacctgcggctgtgcccctcttcagagggcgtgaaccgttttagcgcagcgatcaacaccagaggccgtggccgacagggtttttccgcgagtttcaattatttagggtaaggtttttcaaggttttagccccgaccgcccggattcagcgcatgccacggggcgtgcgcaccaaggcaaagcaaaagctgtaccacacgattgcactgaaccttcaccgatgccggtgactcgaaaccacatcgacctacacacgtacacatcagccactcacggagataaccatggccagaaaaacagcaaagactgcccaagagatcctgctggaagattttcaaaccctggtaagtgacaccgaaaagctgctggacgacaccgccgtcctggccggcgaccaggcagacgagctgcgtaccaagatccatgacagcctgctcaaagcccgtgaaaccctgcaactgaccgaagattccctgcgcgaacgcggccaggcggcagtgaccgccaccgaagattatgtgcaggccaacccttggcagtccgtgggcatagcggccggcgtgggctttttgatcggcctgctggctacaaggcgctaaatcatgtctatcggcgaatccagctcgaccacgggctctacctcaagacgtctgggcgcagcggtgctgggcttgctgcacagccacgtcgaattgtttggcatcgaactgcaggagcagaaggcccgaaccgtcagcctgctgctgtttgcaggcctggcgttagtgtttgccctgctgttattggtggggctgtcgacgctggtgatgatcctcgtgtgggacaccggctaccggctgaccggaatcatctgcctctgcgtgttctacaccctggccgccgccttctgcggtgtgcgtttgaaagcggcggtgttcgatgagtccacgcctttccacgccaccctcgaagagctggccaatgaccgggagcgcctgctgccatgagcctgactgaagttccgcaaaccacctcgcgccgggaaatgcgcaaggcgttgattcgcctgcgcatggaaatgcaccgccaggaaatccgccacgagtcccagcaactgatggcaccgctgcacaaggtgcgcaatatgggcagcaactggcaggacagcctgggcatcaagcacgcgccactgtggggggtagcggcagtgacgctgatggggttcttcaccggcaaaggcgcaaagggcggcggtatcagcagcctgacacgcctggtgcggttgggtgcaggtttgatcccactgatcaaattagccatggccggccgcaaaggttaatcgccgctggctgcattcttgcagacagaatcggcccggccttcgtcattgaaggccgggccttttttttcgccgacgcttccaaggaggccccgtgatcgacgggcaaccgctcgcctgcttccaaccctttatcgacaccgccaccgggcgcatcgccggcgtcgaagccttgggccgcctgcgccaggccgacggccgcttgcagtctgtggggccgctgtttgccgacccgcgcacacccggcctgaccctgcgccgtcttgaccggcaaatccgcgacaacgccttgagccgcctgcatgaagccccgcaagactggtttctcagcctgaatatctcgccgcgctggattaaccgcctgcgccccggccaagccttgcccagcctcaagcaagtgcagacgcatggcgttgacccacagcgcatcgtgtttgagatcaccgaattgggcggcgatattcagcgcctggccgacgtcgtggcgcgttatcgccaggcaggtgcgcgtattgccatcgatgacttcggcgccggttattcccagcttgaccgggtgctggcgttgcagccggacattctgaagctggacatgcgcctgttccaggaagcggcgcgcggcgggccgagcagtgaagtcgtgcgtgccctggcacaaatggccgagaaaaccggctgctggatcattgccgaaggcgtggagaccgaggcgcaattgagcttcgccctggaatgtggcgcgcgctatgtgcagggttatctgtttgcccaggcccaactggactggtttgccacggacgccttcgtaccgcgtttcgcccagttgcgcacagcctatgtgcagcaaaaactcgcagagcgtgggcgtgtcatgcaactgcgcctgcaactggtggagttgatgaggatcctgcaaagctgggcccaaggccgcgcgccgctcaatcagttaccgcaattgccggactttccctggctgctgcgtttctatcagtgcgaccgccatggcacccagctgacacccaacttcgaatggcgccaggacgcctggcaagccgacagccgctacctgggccataactggtcgtggcgcccctacttctaccacctgcttgctgaaggctgggaagaacgccgcctgattttgtcttcaacctatcgtgatgccacgacgaaccaatactgcctgaccgcaggacaattcttcgataacggtcagcgtttgctgttaatcgatatcgacgcggccggtctgtagatttccgcttgccccaccgcagcggaaccgggaagctgggggatgtcattcacagcacggagagtactcgccttggattggcccaccctgcttacccgcgaacgtcttggaaagcccctgcacagcccggaagaactgggccgcagcccgtttcacaaggatcacgaccgtattatcttctccggcgcatttcgtcgcctgggccgcaagacccaagtacacccggtgtcgagcaacgaccatatccacacccgcctgacccattcgctggaagtcagttgtgtcggccgctccctgggcatgcgtgtgggcgaaacattgcgcggcgccctgcccgactggtgcgaccccagtgacctgggtatggtcgtgcagtccgcttgcctggcgcatgacatcggcaaccctcctttcgggcactccggcgaagatgccattcgccactggttccaacaggccgccggacgcggctggctggacgacatgagcagtgccgagcgcaatgactttctgaacttcgagggcaacgcccaagggtttcgcgtactcacccagctcgaataccaccagttcgatggcggcacgcggctgacttacgccacactcggcacctacctgaagtacccgtggaccgcgcgccatgcggattccctgggctacaagaaacacaagttcggctgctaccagagcgagctgccgattcttgagcaaatcgccagcaaactcggtttgccgcaattggaggagcagcgctgggcgcgccacccgctggtgtacctgatggaggcggcagacgatatctgttacgccttgatcgacctcgaggacggtctggaaatggagctgctggagtacgccgaggtcgaatcactgctgctcgacttggtcggcgacgacttgccacagacctatcggcaactgggcccgcaagactcccgccggcgcaagctggcaatcctgcgtggcaaggctatcgagcacctgaccaacgcggccgcaagggcctttgtcgaacagcaggacgctttgctcgccggaacgctaccgggcgatctcgtggagcacatgcacggcccggccaagcgttgcgtgctggacgccaaagacatggcgcgcaagaagatcttccaggacaagcgcaagaccctgcatgaaatcggcgcttacaccacgctggaaatcctgttgaacgccttctgcggtgcggcgctggagcagcatggcgggcgcacgccgtcgttcaaaaatcgtcgcatcctcgacttgctgggcaacagcgcgccagacccggcatggtcactgcacgcctctttcctgcgcatgatcgactttatcgccggcatgacagacagctacgccaccgaaatggcaagggagatgaccggacgctccagcccgcaatgaactgaccggtcacgccgcctgtctcccgaacagaatctgcctacgacgggaacagagcggcctgatcgaattcgcacaaccattcgaagaataatcgcgcacgcttccggcggacctggcgagcagttcctacacccccatcgatgcttgactgacccgtgtactttatatgcgcagaaacccccctcgaatcctgttggtggaggatcacccttttcaactcctggccactcagtgcctgctcaaaagcttcggcttcgaccaattgaccttcgcagagaacgcggaacaagccatccgctcgatgtcccagtcacatgagccgttcgacctcttgctatgcgatcaatgcctgccagacttgccagggctggaattggtagaaattgccagtcgtcggcactttatagtcggcgcgattatcttgagcgggctccctcagggcgagcttctctgcctggcagcccaggccttgcagcgcggcctgccactgctgggctgtttatcaaaaccgctgaacaaagacgaactgctcaggctgacagcgcccctgtgaacacgaaattcaaacactgcaaaccgactaacgtttatctaaaaccaccgcattagctaccctcaatgattaccgtcattaaaggccagcttacatctaacgtaacaacgccttatcagccggtaggttattaccttttttgctgtgggaattttcctgttttatatctactcgccccaaggctcatgctcctcccgcatcttctgagctaatgtgcccgctttatttgcacttgcatggaatgtgattatgaacacggtttttatcattgatgaccatcctgttatcaggttggcgattcgaatgttgttggagcacgaaggttataaggttgtcggcgaaacggataacggctgtgacgcaatacaaatggttcgcgaatgccttccagacctgatcattctggatatcagcattccgaaactggacgggcttgaagtgctctgccgattcaacgccatgaacacccagatgaaaacgctcatcctgaccgcacagtgcccaaccttgttcgctacgcgttgcatgcgttccggtgctgacggctatgtgtgcaaggaaggagacttgagtgagctgctcagcgcgattcgcgccgtattatccggctacaactacttccccagccaggcgttgactacgagcgggccggaaagcaactccgaggagctggaactgttcagggcggtaaatgaccgagagctaatggttttgcaactttttgcgcaaggccgaacaaacaaggaaattgccaaaggaatgtttctaagtaataaaaccgtcagcacttacaaaaagaggctcatgcaaaaactcaaagccaaatccttggtagaacttatcgagatggcaaaacgaaacgcgctagtgtgagaaagcggatgcccaggcgtataaaggactatttgattatattggttgccggtatgtgcatcagtactgccgtgcccgcgggccctccagccagcccggaacatttcaccttattgagtcgtgcgagtgccgttcaactggacattcaactggacaaggctcaacgccagtggttgcagaacaaacgcgagttggtgctaggcactgcaatgcccgattatcctcccttcgacctgacatccagcggccgtgactacgagggcctcaccgccgattacgcaggattgctggccaaggtcctgtccttgccgataaaagtgttgcgctaccctacgcgtgaagcggcgattcgtgccctggaaaccggcgatatcgacttgctgggatcctccaacggttatgaggcttccaacccaaacctcaccctgtcagaaccctacgccgtggatcaaccggtactggtcactcgtgaaggcgaaacacgcagcctcgctgatggcctggccgggttacgcgtgagcctcgtctatcactacctgccgctcaatgaagtggagaagttgtacccccgtgcgatcatccgcgcttacccttcctatcagaatgccttgaatgcagtcgcattcgaccaggctgatgtcttcctgggcgataccatttccacccactacatgatcaacaagggttacctgaagaacatccgcatggccaatttcggcaaacatgaagcctatggattcagctttgccatgcgccaggaccagcgcatgctcctgagcatcgtcgacacggtgctgatggccgtgccctccagcaagcgggacagcatcgccaagcgctggagcgcaggcagcgacattctgttgaccgaccagaagttgcaactgacacaacgcgaagaacgctggttgcaagaccatccggtagtgaaggtcatcgtcaacgaaacgtttgcgccgctgacattcttcgacagcgacggcaactttcgtggcatcaccgcagacctgctggaactgattagcctgcgtaccgggctgcggttcgataccctgcgtgcccgtgacgtgaatacgatgatcgaacaggtcgacagtggaagagccgacatcatcggagcaatcgtccccagcatcgagcgcgaagcccaactgaatttcagccgcccgtatcttgaaaattcctacgtattgctgacacgtaaagagctgggtgcccctttaaatctggaacagatgaacgacaagcgcctggccattacccagggcaacccgctgagcaaaacgctgcgtgagaacttcccccacattcatctggtggaaaccagcgacaccttcaaggcctcggagctactggctcaaggacaggtggacggcgcggtgaactctctggtcatcgccaattactttctctcatcgcaagtgttccaggacaagttgcagatcagcgccagcgtgggcacgctgccggccactttcgccttggcaacttctcgccgggcaaccgaattgagctcgatcctcgacaaggcactgctcagcattgccccggacgaattgggcatcatcaatagccgttggcgaggttacacggcagcgtccgacagctattggcgcaactaccatcagctgattgcacaaatcatcatgggcaccgggctgctattactgatttccctgacctggaacgcctacatgcgccgccagatcaagcaccggaaaatggccgaacgggccctcaatgaccaattcgagttcatgcgagcactggtcaacgagaccccgcacccgatctacgtgcgcgatcgccggggcttgctgcaaacctgcaatgacagctacctgcaagtgttcaacgtcaagcgcgaagacgtgatcggtaaaagtgtgatccagatggacatggccctcgaaaaagaagcggcgcaataccatgccgactaccaacgggtggtggccgaaggcaacccgctgattctcgatcgcaccctgcatatccatggaaaaaaactgacgatctaccactggatcctgccctaccgagactctgtgggcgaagtccagggcatcatcggtggctggatcgacatcagcgaacggcgccagctgtttgacgagttgcgcgcagccaaggaaagggccgacgaagccaaccgtgccaaaagcaccttccttgccacgatgagccatgaaatccgtacgccgatgaacgcagtgatcggcatgctggagttgacgctcaagcgagccgaccagggccaccttgatcgcccggccatcgaagtggcctacaactcggccaaggacctactggagctgatcggcgacattctggatattgcacgtatcgagtcaggccgcctgagcctggcgccggagcgtgtgaacctgcgggaagtcatcgagtcggtggcgcgcgtcttcgacggcttggcacgccagaaaaccctcagcctgttgctggaattcaagccggggccagacgattcggatgtattgattgaccctctgcgcttcaaacaggtgctgtccaacctggtcagcaatgccatcaagttcaccgaacgcgggcaggtcaaaatcagggtcgatgtgcaaaccacagaggtgccgcaacaagtcgagatgaaactcgtggtggaggacaccggcatcggcatcagccgtgatgaccagttacgcctgttcgaaccctttgcccaagccgacaactccgggcaactggcccgcagcggcgcaggcctgggcctggtgatctgccgcagcctgtgcgaaatgatgggcgggcagctaagcctgagcagcgtccccatggtcggcacccaggtgcacgtcaacttgaaaatgacccgcttgccgccgattcagccgctgagcgagcacaaaccggtagtgcctgctcttgcgccggtactcaatgtactggtcgtggatgaccacccggccaaccggctgttgatgtgccagcaactgggctacctgggccaccaattcactgcggcccagcatggcgctgcggggttccatgcctggcgccaggaacgcttcgacctgatcattgccgactgcaacatgcccatcatgaacggctacgagctgagccgctcgatccgtgaatatgaacagcgggaacaactgcccccctgtgtcgtattgggtttcaccgccaacgcacagccggaagagaaactgcgttgcgccgaagcagggatgaacgactgcctgttcaagccgatcagcctcacggcgctggagcgccaattggcccagatcaaaccgcagccttgcgggatacagctggacctcggcagcctggatgcgctgacaggaggcgacccacagctgagccgccgtctgcttgaagagctattgagcagcagctgtcacgaccgtcaggaattgatgaccttgctggctcggcaggcttcagcgcaagaaatcattgaccaggcccacaagatcaagggcgccgcacgcatcgtgcaggcgggcgtgctggccagcgaatgtgaagcgctggagcaggcgtgtacccagggacttgatcagccggcaatcgagaccggcatcaaaaccctggaaaaatgcatgcttgaactggagaggatgctgcagttgcgcctcgatagtctgggcgccacatcgtaagcaggagcgaatgtatccattcgcccctgcaaccgttgatcaacagtcggtcaagcgcaggaagatcgccgccaattgctcgatacccgcctggtcctgctgggtgaagcgggccagcgaagggctgtccaggtcgaggacgccaatcagttggccatctttgaccaacgggacgaccaactcgctgttggacgcgctgtcacaggcgatgtgccccgggaaagcatgcacatcctcaacgcgctgggtttgccgggtggccgccgccgctccgcaaacgccacgaccaaaggggatgcgcacgcaggcgatctggccctgaaaggggccaagcaccaactcttcattgcgattgagatagaaacccgcccagttcaagtcgtccaactggttgaacaaaaacgcggagaactgcgcgctgttggcgatgaagtcacgctcatcggccaacagtgattcaagctgcgcgcacagcatggcatagccatccaggcccgtaccggcttgttgtaaatcgatcatgcctgacgctccagcaatttgaggcccacccagtaacgggcgaattgataggcacagcggccgttgcggttgccgcgcccggtcgcccagcgtaccgcgagaatgtcgagctgttcatcgcgctgccactgcaaaccggccttggtggccagctcgccgatccagtgctccaccacgtccaggaaatgctcctgggtaaatgggtagaacgacagccacaagccgaagcggtccgacagggcaatcttgtcttctaccgcttcgcttgggtgcaattcgccatccacgcgcttccagttgtcgttgtcgctctggttttccggcaccaggtgacgacggttggacgtggcatacaacaacacgttttccggcgcctgctccagcgagccgtccaacacacttttgagtacgcggtagtcaccctcacccgcttcaaacgacaggtcatcgcagaacaggataaagcgttgcggcaacttgagcagttgctcgacaacccgcggcagatcggccagatggtcgcgctcaatctcgatcagacgcaagccggccttggcgtgctgagcgagcaaggcacgcaccatcgacgatttgccggtgccccgtgagccccacagcaacgcgtggttggcaggcaggccgtcgagaaactgctgggtgttgcgggccaatgtttcacgctgcttgtccacgccgatcaaatcggacaggcgcatgtccaggctcacttccagcggaagcaaaaagccactgcgaccttctcgctgccagcgggcagccaggcattgattccagtcgatggctggacgcagcgcgggcaacaagggttccagtcgagcaagtaccgcatcggcacgctcaagaaaggcattcaatcgagaatccacgattattcctctggcaagttcttgcaaaagatggcgtattggcaaccctgcggcagaccgcagaaagctgcgtaaaaaatcgattcatgccgggcaagccagagcctgtggatgttcagctatgcttgccgggcgaagggaaacgtgaagtggttcaacacccgatggatatcaagttcgcccaccgcttgtcttataaacaagccagattgactgtgctggtcggtttcgtcttgggaaccttgctcagcctgatccaaatcggcattgattatgccagtgaagacgcatccatcaaccgtgaaatacgctcgctgatcgaaatcagccataaccccgcctcacgtatcgcctacaacatagacgccgaactcgcccaggaactgacactgggcctgctgcactccccggcgattacgcgcgcgcagttgatcgacaacaatggcgtggtgctggccgacgtcaatcggccacgcaaggaaagtacctaccggcctatcagcgatttcctgtttggcgccaaccgtgaatttgaagaccgcctgtatctgagccacatgcctaatgacgcccttggcgtgttgcgtctggacgtggatacctacgccttcggcagccgcttcctgcaccgcgccgagattaccctgctcaacggctttgcccgcagcctgctgttgacggggatcctgctgggcctgttctacgtgatgctcacccaaccgctggtgcgcattatccgcgcactgagcaccagcaagcaggccaaactggactgcccgcctgggcatgaacacgatgaaatcggcgtattggtcagcgtcgccaaccagcaattcgaaaacatggagaccgaaatccagcagcggcgccacgccgaagaccgcctcaccgaatacctggggcaactggaagatattgtttccgcacgcacccttgagctcaaagccagcaaccaacggctgagccaatccaatgatgaactggaagccgcgaagatgaccgccgtgggcatggcccaggcgcgagcggcattcctggccaatatgagccatgaaatccgcacccccctcaatggcttgctggggatgattgcgctgtcgctggacagcccgctgaacgccgagcaacgccagcaattgtcgattgcccatgactccggcaaagtgctggtggagttgctcaacgatatcctggacctatccaagttcgacgctggccagctggaactggagaagatcccgttcgacctcggttcattggtggaagataccgccaaccttttgtcgcaaaacgccgcaccgagcgtggagctgacctgtctgattgacccgctgtttcctgcacaggtgattggcgaccctacccgcgtgcggcaaatcgtcagtaacttgctgtccaacgccttgaagttcacccgcttcggccgggtcgacgtacgcctgagcgcccacgagggccgggtaaaaatcgaagtgtgcgacaccggtatcggcatcgcccaggatgcccaggtaaaggttttccaacccttcacccaggcgggtgctggcatcacccgtcagtttggcggcacagggctgggcctggcgttgacgcacaacctgtgcgaagcaatgaagggccgcctgagcatcagctcggaagtcggctttggtagccaattctgtgccgacctgccactgccggtgcatttgcccgccgcccggcacgcgccattggcgggtgaagtcatcgcgatcaccagtgccgacagcggcctgacggaactgctgaccaccctgctgccccattgggggctgacgcctcgctgctacgcccgcgatacagacctgagcggacaaacccctgatctgttgattacggactgcccggaatgcctgttccgtttacgccccacgatcagcgcgccaatcctgctggtcaccgcttacggcaatttcatgcccagcgaggaagtcgcagccctggggccactgcagcagcaggcacgccccttgagccgtaatgcgctgtaccagattctgcaacgcaccctgcgcagcgacgaacaattgatcctcgaccccgtccagatggaggccgcccccctcgcccaccgcgcgcgtattctgctggtggaggacaacccggttaaccaactggtggccaagggcatgctcagcaagcttgggtgcgaggtgatcgtggccgcccatggtggcgaagcgctcaaacgcctcgaagaacagcgtttcgacatggtgctgatggactgcaacatgccagtcatggacggttacgaagccagccggcagattcgtcgcagcgggcgctggccggagctgcccatcgtcgccttgaccgccaatgccctgtcggaagagcgtgaacgctgccgtgcggcgggtatggacgactacctggccaagccttttcgccgcgaagagctcaaaaccttgctggacctgtgggtgcctaagacgacaagcctttgatctgtgccagcaactgatccaggccgcttcgcagggcatcggcctgattcaggtcgacgccggcgtcacagagcagccgggttttcaggctgtgggctttaccgtgcagcctcgcgcccgcctcgctcaatcccagatgcacttcgcgctcgtctatcgcactgcgctggcgcctgaccaaccccagttgctcaaggcgtttgagcaacggagtcagggtgcccgagtcaagcatcagccgctcgcccagcgccttgaccgtgggttgcgcaggctgtgcggcctgccattcccacaacaccagcatggccacatattgcgggtaggtcagacccaattgatcgagcatcggtttgtaggctcgggtcaccgcccgtgaggcagcgtagagcttgaaacacaactgatcgtccagagccagggacacgatgggagcgtcagtcatttgagcagagcttcgatctcttgggtcaggtcctggggcttggtggtcggtgcgaagcgcttgaccacctggccatcgcggccgatcaggaacttggtgaaattccacttgatgcccttggagcccagcaggcccggcgcctgttttttcaactgcacgaacagtgggtgggcgccttcgccgttgacgtcaatcttcttgaacaatgggaagctgacaccatagttcagctcgcagaactcggaaatcgcgccttcgttgccgggctcctgcttgccgaactggttgcaggggaagcccagcacgaccaggccctggtccttgtactgctgccagagttgttccaggcctttgtactgtggggtgaagccacacttgctggcggtgttgaccaccaaaatggccttgccggaaaagtcagcgagggtcttttgctcacccttgatggtggtgcacggaatgctcagcagtttgtcgctcatggcggcgcctcgactctggaagaagaaggggaaaacatagcttgcgattcaattgcgtgcaattcaattgatcacagtgatggggcgtactcggttcaaatgtgggagccgggcttgcccgcgatgcaggcacctcggtctctcagccgcaccggggtgcccgcatcgcaggcaagccagctcccacccacgccatctgccctagcgcggcacgaggtccaggcacaccgaattgatgcaataccgcaggccggtcggcggcgggccgtccgggaacacatgccccaggtgcgcatcgcacttggcacaggtgacttcggtgcggatcatcccgtggctgacgtcacggatctcgatcatggcgctgtcggcaatcggcgcgtagaagctcggccagccgcagccggaatcaaacttggtggttgaatcgaacagcgcttcgttacaacagatgcagtggtacacgccgtcagtcttggtggcgttgtacttgccggaaaacgggcgctcggtgcccttcaaccgacagacctgatattgggcggggtcgagcatttcccgccattcctccagcgttttatccaacttttccatcggtacacctcggcaactgaaaaaccctgatctgtgtcttttccatggatcaggcggcacgtatgattgcgcctcttcaaaacgccagtctggcacccgcgctaccggcattcaaacgtatttatgggtgcgagccccgcaggtttcgcagtacggtagtgtccacaccgtctggatcgttcattttcaggatcacatcgccatgcaggtcagcaaatcgaacaagctcgccaacgtctgctacgacattcgcggcccggtgctcaagcacgccaaacgcctggaagaggaaggccatcgcatcctcaagctgaacatcggcaacccggcgccttttggtttcgaagcgccggacgaaatcctccaggacgtgatccgcaacctgccgaccgcccagggctacagcgattccaaaggcctgttcagcgcgcgcaaagccgtgatgcagtactaccagcaaaagcaggtcgaaggcgtcggcatcgaagacatctacctgggcaacggcgtgtccgagctgatcgtgatgtccatgcaggccctgctcaacaacggcgacgaagtgctggtgccggcacccgactatccgctgtggaccgccgccgtgaccctggccggtggccacccggtgcactacctgtgtgacgaaggcgccgactggttcccggacctggccgacatcaaggccaagatcaccccgaacaccaaagccctggtgatcatcaacccgaacaacccgaccggcgcggtgtactcaaaagaagtactgctgggcatgctcgaactggcgcgccagcacaacctggtggtgttctccgacgagatttacgacaagatcctctacgatgacgccgtgcacatctgcacgggctccctggccccggacctgctgtgcctgactttcaacggcctgtccaagtcctaccgcgtggcgggtttccgctccggctggatcgccatctccggccccaagcacaatgcccagagctacatcgaaggcatcgacatgctggccaatatgcgcctgtgtgccaacgtgccgagccagcacgccatccagaccgcactcggtggctaccagagcatcaacgacctggtattgccccagggtcgcctgctggagcagcgcaaccggacttgggaattgctcaatgcaatcccgggggtcagctgcgtgaaacccatgggcgcgctgtacgccttcccgcggatcgacccgaaagtctgcccgattctcaacgacgagaagttcgtgctcgacctgctgctgtcggagaagttgttggtcgttcaaggaacagcgttcaactggccgtggcctgatcacttccgcgttgttaccttgccgcgcgtggatgacctggacatggccattggtcgcatcggtaacttcctgaaatcctatcgccagtaacgaatattgcgctgtacgaccggcattcggtcgtacagcgattatctggcaacacttctctgcccttcacctctgcttccccgctgcagcacgccacggatcggtcagcccctataattgcgggacggcaaggcgaaaacccggtgaattcggtcgattttccaggtcggaaaatcccttcaaggctctacattcaggctgtaggacacagtttgaaatagtcgctcggttgaatcaccccaaggcgcaccttatataccccgcagtacgcgacatattaagcatgaggagaactctacaaccatgatgcgcatcctgctgttcttggccactaacctggcggtcgtgctgattgccagcatcaccctgagccttttcggcttcaacgggttcatggcggccaacggggttgacctgaacctcaatcagctgctggttttctgtgcggtctttggttttgccggctcgctgttctcgctgttcatctccaagtggatggcgaagatgagcaccagcacccaggtcatcacccagccacgcacccgtcatgagcaatggttgctgcagaccgtggagcaattgtcccgcgaggccggcatcaagatgcctgaggtcgggattttcccggcctatgaggccaacgcctttgccaccggctggaacaagaacgacgcgctcgtggcggtcagccagggcatgctggaacgcttctcctacgatgaagtgaaggccgtgctggcccacgagatcggccacgtggccaacggtgacatggtcaccctcgcgctggtacagggcgtggtgaacaccttcgtgatgttctttgcacgaatcatcggcaacttcgtcgacaaggtgatcttcaagaacgaagaaggccgtggcattgcctacttcgtggcgactatcttcgccgaagtggtactgggtttcctggcgagcgcaatcaccatgtggttctcgcgcaagcgcgagttccgcgcagacgaagccggcgcccgcctggccggtaccggggcgatgatcgcggcgctgcaacacctgcgctccgaacaaggcctgccggtgcacatgccggacagcctgacggcgttcggcatcaacggcggcatcaagcagggcatggcgcgcctgttcatgagccacccgccgctggaagagcgcatcgacgcactgcgtcgtcggggctgataagccacgggtgacacaaaaaggggcgatcttatcgctcttttttgtgggtgctgatatcgccatcgcaggcaagccagctcccacagggaaactcggtctactgtgggagccgggcttgcccgcgatgacggcggcatgatcaacaccgcttcagttgatacacacgttcttccagccgcgtgacaccatcctgcacaaacttccagctctcacccagaatgtcctgctcttccaacacatccagcgtccatcgcacgccgaacaacagcctcacttcatcatccgtaacagcaaacggcgggccggccttctgcgtctggtcgtaatcgagggtgatcaacagcccctgacaacccgaacccagcaccttatcgagatgcgccacatactgcgcacgcatcagtggcggcaaagcgatcagcgcggcgcgatcgtaaagtgccgtgcactgcgccactgcatcagcgtgcagcgcaaaaaagtcaccgcaccaaagctcgatctgctccgtctggtagaccttgaaagcgccctgctggctgatccgcggcacgagcccctgctcatcgaaaaacgcctgtacagcctgttccgacagttctacgcccatcacccgatggccaacacttgccagccagaccagatccaggcttttgccacacagaggcaccagtaccttagagccttgcgccaatgccagttgcgaccaatgcctttgcagataagggttaacctcaggcaaatgaaagccgatctgattacgcgcccagcgctcctgccaaaatttaggctccataaatcactctgaaaattcgatcaaaaagggctaaaacttatattagatttagatcaatgatctgattgaagatgggctcatattaacgctcaggaccccgattatgctccccagcctgtttatctcccacggctcccccatgctggccctgcagcccggcgccagcggccctgcgttgcagcgcctggcggccgaactgccacgcccgaaagcgattgtggtggtgtcggctcattgggaaagccacgaactattggtcagcggcagtgccgccccagaaacctggcacgacttcggcggcttccctcgcgaactgtttgccgtgcagtacccggcaccgggcgacccgcaactggccggcgagattgtcgaactgcttcacgcggacggtttgggcgcacgtatcgacgatcgccgcccctttgaccacggcacctgggttccgctgtcgctgatgtacccggcggcggatatcccggtggtgcaggtttccctgcccagccgcatgggccccgccctgcagacacgcgtcggccatgccctggccagcctgcgcgagaaaggcatgctgttgatcggctccggcagcatcacccacaacctgggcgagctgaactggcacgcggggcctgagagcatcgagccctgggcgcgagactttcgcgattgggtggtggataaactcgctgccaacgatgaaaccgccctgcacgactatcgccgccaggcaccccacgccgtgcgcagccatcccagtgatgagcatttgctgccgctgtactttgcgcgcggggctggtggtgatttcagcgtggcgcaccaggggttcaccatgggcgccctcgggatggatatctaccgttttggctgaagaaacgcgccccagctcccacatttgatcaggggcagattaaaaatcgcaggcaaaaaaaatccccgaacaggtcggggattttttatgtgcgatcaatcagcccaagggcggatcaatcctcgcggtagcgacgcagcttcagctgcttaccggcaacgcgagtgtctttcagcttggccagcagtttctccaggccatcttccggcagctccaccagggagaagctgtcacgcacctggatgcgaccgatcgcttcacgtgccaggccaccctcgttgaggatagcgcccagcaggttcttggcagcgataccgtcacgcgcacccagcgcggtacggcagcgagcacggccttcagccaatggaaccggagcgcgacgctcacgatcaccacggtccggacggtcgccggaacgctctggacgatcaccgcgtggcgcgctgttcggaaccagtgggcgttctttctcgatggctgccagggtcagggcttgaccattggtagctttgcgcagcaaggctgcagccaaggcacgcggggtgcaaccgatatcggcggtcaggcggtccagcaggtcgccgtgggtcgattcagcgtcagccaccagtggcgccaggctgttggtcagtttcttgatgcgggcatccagaacagcctgggcatccggcaggcggacttcagcgactttctgaccggttacacgctcgatcacttgcagcatgcggcgctcacgtggagtcaccagcagcagtgcacgaccttcgcgacccgcacggccggtacggccgatacggtgaacgtaggactctggatcgtaaggcatgtcaacgttgaacacgtgggtgatacgtggaacgtcgagaccacgagcggcaacgtcggtcgctacaacgatgtccagacggccatctttgagggagtcgatcacgcgctcacgctggttctgggcaatgtcaccgttcagcgcagcggctttgtagcctttggcttccagggcgctggccaggtccagggtcgcttgcttggtgcgaacgaacatgatcagggcgtcgaagtcttcgacttccagcaggctcaatacagccgaggtcttctggtcagcgtgaaccaacaggtgagcctgttcgatcgcggtaacggtctgagtcttggtctggatcttcacgtgttgcggatcgcgcaggtggcgctcggcaatggcacggatcgactgtggcagggtggccgagaacagtacggtctgacgggtcggtggcagtgccttgaagatgacttccaggtcatccatgaagcccagcttcaacatttcgtcagcttcgtcgagaaccaggtggttcacggtcgccagaactttttcgtcacgacgcaggtggtcgcacagacggcccggcgtggcgacaacgatctgtgcgccattacggattgctttcagttgtgggcccataggcgcgccgccgtaaacggccacaacggttacgcccggcatttgcttggcgtaggtttcaaaagcggttgctacttgcagcgccaactcacgggttggcgccaggatcagggcttgcggctcgcgcttggcaggatcgatgcagtgcaggattggcagagcgaacgcggcggttttaccggtaccggtttgcgcctggccaatcatgtcttggccggccatgatgatcgggatcgattgctgctgaatagccgaaggttcttcatagccagtcgcgatgacggcagcaagaatgttcgggttaagattaaaagcggcgaagccgccggtttcctgggtcatgggtctgcctctaagtgcatccgcaaagacccatgctccaaagctgcgcatgccgtgttgagactcaagagtcgccctggctgctttgtcggcggggatttgcgaaaacgaatgaatgaaaaagattcgtcaaggaagagtccgctgtgcggacgtgcagccgaagctgacttcggggaattgcgctacctaaacgcggcccggttaaaggccggcgcgcactataccggaaatacctgaaaaagggagctttttttatcgcaaagcaccgataaaccgcgctgcgtcaccgcctttgcagataacggtgccagggtctatttttcagaagcccggccctgttggccctatagcttaaacgcttcacctaccgttcaagacctttggtctgaaacccaacccgcgcccgagggcacacccgatgaatcaagccagcagcagtcgtgtcagccgtgaattacagggtcatgtcttgctgttaggcctggaccgggtcgccaagcgcaacgccttcgacctggacttgctcaatgaactgagcctggcctatggcgaatttgatcgaaacgaccaagcgcgggtggcggtggtgtttgcccacggcgaccacttcaccgccgggctggacctggcgaatgtcagcggcgtgatgtcgggaggctggcaaccgccgctgggcggctgcgacccgtggggcgtgttcgccggccccagagtcagcaaaccggtgattgtggccgcgaagggttactgcctgaccatcggcatcgagttgatgctggccgcggacatcaatatttgcgcgagcaacacgcgctttgcgcagatggaggtgcaacgcgggatctttcctttcggcggcgcgaccctgcgttttcatcaaatagccggctggggcaatgccatgcgctggctgttgaccggcgacgaatttgacgcccatgaagcgctgcgtctgggattggtgcaggaagtgatggccagcgaagacttgctgccgcgcgcgatcgaactggccaaccgcattgcacgccaggcgccgctgggcgtgcaggccacgttgatgtcggcgcgcctcgcgagaatggagggtgaggctgtggcggcggccgcgttgcagcctgttgtcgagaagctgttggacagtgaggatgccaaggaaggtgtgcgggcgatgatcgagaagcggcccggtgtcttcaaaggtatttgaccgaattgaagatgcaatcgcgggcaagcccgctcccacctttgaactgcatctccctgttgaaatgcattcccctgtggaagcgggcttgcccgcgaaggcgtccgcccgggcaacttaagtcgccgggcgaatcaccttgatcagcgactgcaacgaataacctaaccgcggcgccaacgcctctgcacgggctgacagcgccggcatatcaagctcctgatccagatcggacggcaccaacagaatcacattgccctccttcaccggcagctcccagtaatgccggtggtacaacccgcgcagcaatgccgcccccagcggcttgccatcgtcggtcgcccactggttgatcaccagccagccaccggggttgagtttcttctggcagttttccaggaaggtccaggccaggtgcccgacgcccgggccgacgtcggtgtaaaggtcgacgaaaatcaggtcggccgattcggcgctatccagcaattgcagggcgtcaccgacccgaatgtacaagcgcgggtcgtcatccaggccaaggtattcaatggccaggcgcggcacgtcggggcgcaactcgatcgcttcgacatcttccagcgccaggaacttgaggcatgcctgggtcagcgtgccggcgcccaacccgaggaacagcgcgctttccggctgctcatggcacaacgcgccgatcagcatcgcgcgggtgtagtcgtactccagccagctcgggtcggcggtgaatacgcagctttgctcgatggcgtcgccgaactcgagaaaacggtaatcggccacttcgagcacacggatcatgccgaagtcatcatggacttcggccagcaggcgctcgacacgctcctcggtcatcactactcctaaaaggtttaccgcacggcaaaggcgcgattgtcggccaaccggcggcaacaggtcacgcactaattgctgataacattggcgcccgaccgtcaatcaacctatcgagttcatgatgagccaaccctggagccccgacagctggcgcgccctgccgatccagcaacaaccccagtacccggacgctgcgcacttgctgcaagtggagcagaacctggccagctacccgccgctggtgtttgccggggaagcccgagagttgcgccgtcagtttgccgaagtgacccagggtcgcgccttcctgttgcaaggtggcgactgcgccgaaagttttgccgagttctccgccgcgaaaatccgcgacaccttcaaggtgctgctgcagatggccatcgtgatgaccttcgccgccggctgcccggtggtgaaagtcgggcgcatggccggccagttcgccaagccgcgttcggccaacgatgaaaccatcgacggcatcacactgcccgcctaccgcggcgacatcgtcaacggcatcggcttcgatgaaaaaagccgcgtgccggacccggatcgcctgttgcagtcctatcaccagtccaccgccaccctcaacttgctgcgggcctttgcccagggcggtttcgccgacctgcaccaggtgcacaagtggaacctggactttatcgccaactccgcattggccgagaagtacagccagttggccgaccgcatcgacgaaaccctggccttcatgcgcgcctgcggcatggacagctcgccacaactgcgcgaaaccagtttcttcaccgcccacgaagcgctgctgctcaattacgagcaggcctttgtacgccgcgacagcctgaccaacgactactacgactgctcggcccacatgctgtggatcggcgaccgtacccgccaactggacggcgcccacgtcgaattcctgcgcggggtgaacaacccgatcggggtcaaagtgggcccgagcatgaaccccgacgacctgatccgcctgatcgacatcctcaacccggacaacgatcccggccgcctcaacctgatcgcgcgcatgggcgccggcaaggtcggcgaccacctgcccggcctgatccgcgcggtgcagtgcgagggaaagcaagtgctgtggagttcagacccgatgcacggcaacaccatcaaggccagcagcggttacaagacccgcgattttgcgcagatcctcggcgaggtaaaggcgttcttccaggtgcatcaggccgagggcagttacgccggcggaattcatatcgagatgaccgggcagaacgtcaccgaatgcatcggcggcgcgcggccgatcaccgaagacggtttgtcggaccgctaccacacccattgcgacccgcggatgaatgccgatcagtcgctggagctggcatttttgattgccgagacgttgaagcaggtcaaacgctgaaccgttgccgtccacactgacgccatcgcgggcaagcccggctcccacagttgaccgcatactcctgtgggagccgggcttgcccgcgatgaggccctaaaaaccactatcggtgtgagtcattgcaaccctcaaccggtcagcacttggccgcagacagttgagctgaacctgttccagccccaaccagccggccatctgccgcagattcaacgccaacgccaacatgccctcgtcatccagccccggctcttcctcatgcaccgcatgcaccgccaaccgcccattggcacgctcggcgcgcaggtcgatgcgcgcggcgatccgttcgttgtgcaaaaacggcaacacgtaatagccgaacacccgcttgtcttgcggggtatagatctccagccggtagcggaaatcgaacaaccgctcagtgcggctgcgctcccagatcagcgaatcgaagggcgacagcaaggcgctggcgggcactttgcgcggtacttttggatcagacagacagaacgccggcgctttccagccctgcacccgacacgtcagcaactggccgtcttcgaccaattcggcaaggcggttgcggccatccgcggggtcgaggcgaaaatagtcgcgcaggtctttttccgtcgctacgcccaacgccgttgcgctgtgcaacagcaaaccacgctgcgcctcggcttcggtcaatgcggtgtgttgaaggatttcgtgaggaatgactcgctccggcaaatcataaagccgctcaaaaccacgccgccccgcgacggtgaccaaacctgcggcaaacaaccattccagcgcgtgtttttcatcactccagtcccaccagggcccggcgcgttcctcgcgggtcgacaagctgccggcgcccaacgcgccctgctgttcgaccgcctgtaacacccgctgaatcgtggcctgctgctcacggccaaaacgcgccatctgcgaatagatgccttggccgcgctgcgcccgctccatgcgccagcgcatcaaggggtacagcgccatcggcagtagcgaggcctcatgcccccaatattcgaacagtgaacgcctgcgcccctggctccaggcggcttgttcaagctgcaacgcagggtagttgcccagacgggaaaacagcggcaggtaatgggagcgaacaaccgcattgaccgagtcgatctgcaacacgcccaaacgctcgatcatgcggttcagatgggcggccttgatcagcgcaggcggctggcgcccggaaaaaccctgggccgccagcgccatgcggcgtgcttgcttgagtgaaaaagacaggtcggcgggcatgcgtttctccttgtgggcgcgccgaccaccctaccccatcgcggctcattttcgcagcgggtcttgccagaaatgctggtggcgctcctgctcgacatcgccacggttgagcccgatgtccttgagcgcctcatcgctcaggctggccaacaactggcgttcatggtgcagtgtctgccaccgggcaatcgtgtgaaaaagtccggaaaacggacgtttcgccatcaacacaaaacctttctgacctttcatcttctcgccctccagtggggatgacgcgagtgtgcgccttgccatatgatcaatccaacgaatgtttcttatgcaatacatctcggagattgatcaattgtccggctacccgagcatcgacactgacgtgctgcgcaccttcgtcgccatcgccgatcagggcggttttacccgcgcaggcgaattggtcaaccgcacccaatcagcggtgagcatgcagatgaagcgcctggaagaagacgtgctgcaacgcaagttgttcgagcgcgacggccgccaggttcgcctcacgcccgagggccaggtgctgctgggctatgcgcggcgcatcctgaaactgcacagcgaagtgttcaataccctgcgcgagccacacatggtcgggttggtgcgcatcggcacgccggacgactacgtgatgcgttttttgccgggaattctcaagcggttttccaaggcctacccgctgatccagatcgagatgcactgcgagtcatcgcacgtgctgatgcagcgccgggacctcgcattgaccgtgatcagccgtgagcccggcaatgaacacggcgaactgttgcgtaccgagcgcatggtgtgggcggcggcgccgtgcttttgcgtggacgaacacgacgccctgcccctggcgatttccggtgtcgacagtttctgcacccagtggactcgcgcggcgctggatgccgcagggcgcgactatcgcctggcctaccacagctccaacgtggcggcgattcaggcggtggtcagttcgggccttgcggtgatggtcagcatggaaagcctggtgacggaggacctgcgtgtactcggcactgaggagggttttccgccactgccgtcgatgaacctgcgcctgttgcgcaacccggccatgacctcgccgattaccgactgcctggcggaatacatccttgaaggcttcagactttaaaggtcagcatcaccgcacagatcgccagaaagccgcaaaacaacccgcgtaatacacgttcgggcaacgcgtgggcgaccttaacgccccaactgatactcagcaggccgccgacggccaagggcacgccgatcgtccagtccacttcgtggtgccaggcgtaggtcacaagcgtcacgctggtgctaggcaacgccaacgccagtgacaagccttgtgcgaccacctgcgtggtgccgaacaaactggtcaacacgggcgtggcaaccactgcaccgccaacgccaaacaagccgcccatcgacccggaagccgcgccaagcacgccgagccatggccaggaataacgcatctcggccgtcggcggcgcgttgcgagtaaacatgcgcagcaaattgtaggccgccagcgtgagcagaaacgcgataaagccaacgcgcatggctcccgcgtccaggcccaccgcccagatcgaacccagccacgcaaagctgaaacccatcacgcccagcggcagcgcgtggcgcaattcgatgcggttgcgctggtggtaacgccacagggcgagcatgacgttaggcaccaccatcaccagcgccgtgccttgggcaagttgttggtccaggccgaacaatacgcccagcaccggaatggcgatcagcccgccgccaatgccgaacaggccgcccactgtgccgagggccgcgcccaaaatcaggtaaatcgccagatccaacaccgctcgccactccaaaagcccaggccctgcatgctacgcagtcggctctggcgtggaaacgcacagcaacgcacaatggctgtgccgacttcgcataagcacccgcccatgaacccaaatatgctgaccgatcaactcggcctgtttctcgatgtactggaaaccggcagcttttccgccgccgcacggcgtcacccgctgacaccctccgcagtcgccaggcgcatcgacagcctggaaagctcagtgggcagccgcctgtttcagcgcagcacccacgccgtagtggcgaccccggcagggttggcgtttgccgaacgggcgcggcggatcgtcagcgaactgcaattggcccgggccgaggctgtatctctcagccacgcgccggaggggttgattcgcgtggatgcgccggcagccttcggtcgacggcatctggcgccagtgattgccgacttcctgaaggtgtatccggggctggatgtgcacctgcacctgatcgacagctttgtcgatatgcagggcgcacacttgggcaaggttgatctggtattgcgcgccgggcatatcgtcgacacccggctgatcgccacgccactggccagtattgtgcgcatcgcctgtgcgagcccggcctacctgaagagccgtggtacgccgacccatccccgcgagctgagcgaacacgacggcctggattgggacggcctggcgccgatgttcgcctggcgcttcgagctggatgggcgtcgcgccacctatcgaccacggcgcattcgcttgagtgcgaacaacgccgaagcgctgctctcgggcgccctcgccgggctcgggatcgcacatttgccgacctggctggccagcgaatacctggtgcggggtgaactgctgccgctgttctgcgaaaacggtttgcccagcccggagaccagcggcatctacgcgctgcgcctggagcaacacgccaacgcgcgcagccgtctactgctggaatacctgaagtcacgtttcagcccagtaccgccttgggatctggcgctacaaagcggcttggtctgaccggcagggcagaattatctggcgcattaaaggtttgcccgctagattccagccaagacacgcttttttaaggcagcgccatgagcaaaaaccctgacccgtgcgaatccctgatgctggataaccagctgtgcttcgccctgcattccacctcgctgttgatgaccaaggtctacaagcccctgctgcaagccctcggcctgacctacccgcaatacctggccatgatggtgttgtgggaagaggatggtctgaccgtcggcgaaatcagcagccgcctgctcactgaccccggctccctgacgccactgctcaagcgcctggaagctgaaggcctgctcagccgcacccgcagccgtgaagacgaacgggtggtggtggtggaactgactgacgccgggcgtgccttgcaggaaaaggccatgggcattccgcagtgcatcctgggggcgagcggcctgcagctggagcaattgcgcaagctgcagagcgacctggtcgcgctgcgcaccaaccttcaggccagcgtctgacgcggtagaacccgccaaccaatctctaatgtgggagctggcttgcctgcgatagcggtacatcagcgatggaaacatcgactgacacaccacgatcgcaggcaagccagctcccacattttgtttgtggtgactaaaaaatttgtaaatttatcttgcgcgctaattattagcgctatacattcgcttcaccaactacttagtgcgcaaacatttagcgctaataacccaagaggaaaacgccatgcaaactctctacaccgcagtagccaccgccaccggcggccgtgatggtcgtgccgtatccagcgacaacatcctcgacgtcaaactctccacccccaaagaactgggtggcgccggcggtcaggcgaccaacccggaacagctgttcgccgccggttactcggcctgctttatcggcgcactgaaattcgtcgccagccagaccaaacgcaaaatcccagatgacgcttcgatcacggcccacgtgggtatcggtcaaatccccggcggtttcggtttggacatcgacctgaatatcagcctgcctggcctggctcaggacgatgcgcaaagcctggtcgacgccgctcaccaagtctgcccgtattccaacgccacccgcggcaacgtggatgtacgcctgcacgtgactgtctgatgccctctgccgccccaggagaagaaaatgaatacaattggtaaagcgctcaccggcaccctgctcgccctctccatcacccaggccttcgcggcaaacggtgacgtagagcacaacacccaggcctttctggacgtgttgaacgccggaaccggcaagccgatggaacaactgacgccaaaagacgcccgcgcggttttgacgggggcacaggccggcgtgaagctgaccttgcctgcggcggatgtgagccagaagaccattcaagtggatggcaagccgctggacctgaccatcgtgcgtccggccggggccaagggcacattgccggtgttcatgttcttccacggtggcggctgggtgctgggggattacccgacccacgaacgcctggtgcgggacctggtggtgggttcgggtgcggccgcagtgttcgtcaactacacgccatcgcccgaagcgcattacccggtggcgatcaaccaggcttacggcgccacccgatgggtggccgagcatggcaaagaaatcaacgtggatggcaagcgcctggcagttgcgggcaacagtgtcggtggcaatatggcggccgtggtcagcctgatggccaaggacaaaggcacgccggcgatcaaattccagctgctgttgtggccggtgactgacgccaacttcgatacggggtcctacaaccagtttgccgaaggtcacttcctcactagaaacatgatgaagtggttctgggacaactacaccaccgacgccaaccaacgcgccgaggtctacgcttcgccgctgcgcgcgaccactgaccagttgaaaggcttgccgcctgcgctgatccagaccgccggcgccgacgtgctgcgtgacgaaggcgaggcgtatgcccgcaagctggatgccgccggtgtaccggtgaccgccgtgcgctacaacggcatgatccacgattacggtttgctcaacgtcgtcagccaggtgcccgaggtgcgttcggctctgctgcaagcgtcacaagaactcaaacaacacttgaaataaaacgcagcgcccacaaaaaagcccgacgcatggtcgggctttttcattcgtacggtttggccagaattacttcttggcgcgacctttgtacgaaccgccttcgcgggtgtcgatctcgatcaggtcgtcgatttcgatgaaatcggctacttgcagttcggtaccgttgctcagcttggcaggcttcatcaccttgcccgaagtgtcgccgcgagcggaaccttcggtgtaggccactttacgcacgatggtggtcggcagctctacggaaaccaggcgctcttcgaagaaaatagcttcgcagacgtcttccatgccttcttcgatgaacggcagaacggcttcgatatcttcagcgttcagctcgtacatggtgtagtcggtggtgtccatgaacgtgtaggtgtcgccgctgatgaaggacagggtcgcttctttgcggtccaggatcacgtcgtccagtttgtcgtcggcgctgtaaacgatctcggtcttgtaaccggtcagcaggttcttcagcttggtcttcatgattgcgctgttacgaccagacttggtgaactcagctttctgaaccagccaagggtcgttttcgagacggatcactgtaccgggtttcagttctttaccagttttcattgcatatatccgaaatttggatgggatttacaaaaatcaaggtggcgtatcatatccaactttcataaaactgtaccagcgccgtcgcaagatcggcctgcaagccttgttccagagaccacgcctgcgcgtgccggctgacctcaggccagtgttccagcagcattttccacggctgagccatgtcaccctccgtgttccaggcttgccaaagggcgatcagcgcagcctttgcaccggtcgataaggcagcggtgtacaacgccaggaacgcatcgagcttgtccaggtggatgtcttcgtcctggcgatagatgtgccacagcaacggccgcccggcccattgagcacgtacgaaagagtcttcgccgcgcacggcgttgaattcgcagcaccacagcagacggtcatattcttcctggcgcacgaacgcaatgacctgcacgaccagcgcatcacgctgatggacgtcacccgccaccagcccttccacacccagccagcgctgaacgtcgccgagtacccgcccttccggtaccagcaaatgcgtggcacgcccgtccgtcgccagcgcatccagccaactggcgaggccagcgttttcgtaggcaaataacgacatcaagcgcgaacccgccgcaggaaaaacccccaggccttgcaggaattcctgttgcgtagtgccatcctgctgaaatgcctgacgctgttccagtaaacctgtctcgcgcaacaaaccgccggttcccgcacgaaaaccagggaagaagaagtacttttgcacacccttgaacttcaccgaaggcaggcgatggcaacccaccacccactcttcggcgctgaggtaatccaggttcatccataacggcgtgccttcgcgcgcggccatagcctccatgtaatcaggcggcaactggcaggcgaatgcagcaatcaccacatcggcggatcgggtttcagaccattcggccggccagtggcgcacttcaacgccctcttgccattgctgatcccgctgcacatcaatctcggggcacatgcgctcgaacgcccgcaagtcatcgacccacaaacgcacgtcacacccgtgctccactaccaattgccgggccaggcgccaggtcacgccgatgtcgccaaagttatcgacgacgctgcaaaaaatatcccagcgggctttcattgcgggctccaacactcaaaggctcgattgtccgcataaatgcgccgatgcagaaggcttgatcgcgattattctctacagcggctgtgcgacaatcgccgccacgctgcaaatgcctgccaggaggccactatgtctgaccgtccgctgtcgctgttcaaactgtgtcttgccattgcgttcggcctctggcttgggtttattgccattgtgctgaccacgtggctggcctcacgctacctgttcccgcaaagcctggcacctgtcgcacaggccgttcagcaactgggcaaaccggctgccgtagcgccggagccgccgaaccggatgttcgagcagtacaccgacaacctgcgcaaacaggagcaacagcaagctctggatcaggctcgaaacaatgcgcgcaacctgtccaaccccaaatgccagttctggttgcaacaggaccagaacgcgcccaacgaaaagacccgggccaatgtcctgcaattctgtgattgatgaccatgaataaacacgccgtccaccacttggtcctggaaaagctcagcgtcgacctggacatcgcccaacgtgctgcccagaccgcctacgaaactgcgacccacgaagaaaacatcgcggaaaacaaatacgacacgttggggctggaggcttcttatctggcggccgggcaagccaaacgcgttgaagaaatcaagcaggcgctgacactctgccagaacatgcaactgcggccctacgatgaccagcgaggtatagaggtgggcgcattgctggggctggaagacgagagcggtcgccaacagtggctgtttctggcgccggatgcggcgggcttgaaagtcgacgtggtggggcaaccggtgaccgtcatcaccccgcgctcaccgctgggcaaaagcctgctgggcaagtttgaaggtgatgaggtggagattctggtggccggcgcccggcaacacttcacggttaccgaggctaaatagccgaagcgcttttgtggcaagggagcaagctccctcgccacattctgcggtgtcagtggacgggcagttctacgccgtcaaacagttcttccagttcctgcttgttgtggcactggatcgccttggccatgacttcgcgggtcaggtgcggcgcgaatttttcgatgaaatcgcacatgaagccacgcaggaaagtgccgcgacggaagccgatcttggtcacgctggactcgaacagctcgctggcatcgagcaccaccaggtctttgtccagcgccgtgtccactgccatcttggcaacgatgcccacgcccaggcccaagcgcacgtaagtcttgatcacgtcggcgtcggctgcggtgaacaccacttttggcgtcaggccacggtggctgaaggcttcgtcgagcttggagcggccggtgaaaccgaatacgtaagtcacgatcgggtattcagccagggcttccagagtcagcttcggcagcttggccagcgggtggccttgaggcacgaccacgcaacggttccagcggtagcacggcatcatcaccaggtcaccgaacaactccagggcttcggtagcgatggcaaaatcgacggtaccgtctgcggccatctcggcgatctgcatcggcgaaccctggtgcatgtgcagcgccacgtcagggtattgcttgatgaagtcgcggatcaccggcggcagcgcataacgcgcctgggtatgggtggtcgcgatcgacagggtgcccttcttctcgttggagaattcctgggcgatctgcttgatgctttcaactttgcgcaggatttcgccggcggtggtgatgatgcgctcgccggccggagtgacacgggtcaggtgcttgccgctgcgcgcgaacacttccacacccagctcgtcttcgagcaggcggatctgcttgctgataccgggttgcgaggtgtaaaggctttgagcagtagcggaaacgttgaggtcgtggtgcgccacttcccagatgtagcgcagttgttgaagcttcatatgtgtccctcaaagcagatagacgccacgggtatcagcgacggtatataactatattaaaggtaagacggataaatctagaactttttatcgttttctaccatcatatgtcatcgctgcgtcgccgctgtaaggagggcaccagataaaccggcaccgtagacagttgcaacacccgtgcagcggtgcgtccgagcggtgtggccgctgcggttgcatggctatgactacctacgatcaacaggtcgacggaaagtttacgcagctggtcgagaatcacctcgcacgggtccccctggatcacccgcaccgagcgaatcaactgcaagtcctgctccccttcccccaactcctcgcgaaaactgtccagcacgcgttgctcaatcgtcgccatcacggtggtcagcccctggctctgccactcgctcaaggccttttcatcaaggtagctctgcaacaccgattcggcgaacagcccgatcggctccaccacgtgaatcacatacaaatccgccttgaacgttcgggccagtgccagcgcatgttgcatcacataaggcgcatacagaccaaggtccgtggcgtacagcatcgaacggatcatagaacctcctgggcagccaggatggcggagattgaatgagcttagcagtgccttggaaagttcggctcagctctcggtctggattttcaactcgttgctgatgccatgaggcacatgcccggtggcgaccacttccctggctttctcacaatgacccgcctggtcatcgaaaaacacatcggcagcgaaggcttccagaaacgcggctttttccaggccgccgagaaacagcgattcgtcgaggcgaatatcccattcgcgcaaggtacgaatcacacgctcgtgggacggtgccgagcgcgcagtgaccagcgctgtgcgaatcgggcaggcgtcgtctgcgaactcacgttgcaacaggttaagcgccgccaggaaacctttgaatggcccaccgtgcaaaggctcacgcgccgactcccgctcgctggcctgaaacgccgccagaccacccgcttgataaacacgctccgactcatcggaaaacaacaccgcatcgccgtcgaaggcaatcctcagttcctcactcgacgcccgtcgcgctccgcccgataaaatcgtcgccgctgcaaagccggcgtcgagtgcactgcgcacgtcttcagcatgggtggaaagaaacagatggcaaccgaacgcggccaggtaaggataagggctgcgcccgcccacaaacgccgcacgggaaatatccaggccgtaatgctggatagaattgaacacacgcaagccggtatcggcgctgttgcgtgaaaccagcaccacttcaacacgcgcacgccccaggctggcgttgaggctcagcagtttcttcaccagcgggaaagcatcgccgggttcgagggtttcttcctcgtgttcgatctggtacttgcggtaggcctcaacaccctcggcctcgtagaccttgtggctgtcactcaagtcaaacagcgcccgcgacgaaatcgccagcaccagcttgtcgcccaatcccttcgccatggtgtttcccccggagcccgaaacaatcaacgattgtgccgatcaataaagctcaacgcctgatacagcgcctgcatgcgcggcaattcacaacccgccgctttggccgccgcaagcggccgggcatagatggccgccagttccagcgggcgtttatgcacgtggtcgtgatacatgctgggcaggtagtcgtccatggtttcggtcatggtgaacatctgcccggcgtaactggcgggaatttcatgaccgcaggcatgggcgccttttaccacttcggccatcaatgcctggatcaactcacggctcgattcatcggccatcattgccgtggtgccggtaccgagcaataccgaaaggccgttgtagggcacattccacaccaacttgtgccagcgcgcctgatgcacattggccatggcctgggaatcgataccggccttgtgaaacagtgcggcgccttcttcgacgatggctttctggcgtgcctcatcgtcggctgcagtgccactgtggtagcccaaattgacccggccgagtgcctgatgctcgacaacacccggcgcggagcgatgcacgccgatatagcacagaccgcccagcagatgcagcgaggacggcaggtgttcacgcaggctgtcttcaacgtcgagaccgttttgcagcagcacgactttggcatccggcgcggcgacctgggcgatggttggggcgaggtccacgttaccggtggacttggtgcccaccagcagccaatcgcacggcggcatgtcggcggcacgggcataggcttgcacaggatgcaggtgtaatttgccgtgcaacgtactgttgaggtgcaggccatgttcgctgactgctgcgtattcactgcgcagcaggaaatgcacgtcgaacccggcacgcgccagcatcacgccgtagaacccaccgatggcgccggtgccgatgatgccaatgcgtggcgactggggtgcaactacggtcatggcaaatcctctggtgtgcgggtaagggcttgattcacggcgtgggtcaggtcagcaagcccaagacgtgtctgtagttgcccgaagaattgaccctcgcacaccacgaacaacgcgggcaaatgaaagatctcgtagcgctcgacggctccgccgttgtgcccggcatccacccagcacacacggtccaccggcaaacgccagcctggcaactgctggcgtgcccaccggcaactcgaacagcctacgcttgtaaacaccaggagcgaaatacctggcaatcccagcaattgctggtcaatatccaggtcggtcaattccagttccttcactatactgctgccaccgccgtcaactggacggtgctcggagtccgtgtacatgggtcgttttttacctcaccctgatgatgtcgctgtcgagttaatccaacgccccgctcctgccattccccgccaacgcctgcacactatcggcctgggcggcgtcgcctgcaattgcccgcgcgcctggcgccagggcactgcggtggacttgcgcattccgtccctgggcgccagcgcccgctatccgggctatgtcgcctggtgtcgcaaggtggacaacggctaccgtatcggtatctcgtttaccgatgagcacgccttgttcggtgcgcgaatgggcgagcaagtgtgccagatcgaacgctactgccgcttgcacgagcatactgaacctacgcctgctcaacttgaaaccctggcccgcgagtgggtctcgcgccatgccggcgagttcgcccatgagacgtttgtgcagccggtgctggattaaacccggctttgcccattgtcgcgggcccgtgttacgcgctaaggttcctcccccctgcattcaaatcatgctgtgctccgccgcacggggatggctggcggccggcacccgtgaccctgacgagtaacacgatggctgatttaccgatcaacgaccttaacgtcgaatccaacgagaccctgatcacgcccgatcagctcaaacgcgaaatccccctgagcgacgctgccctgcagaccgtcaccaagggccgcgaagtcatccgtgacatcctcgacggcaccgaccaccgcctctttgtagtgatcggcccgtgctcgatccacgacctcaaggccgcccacgaatacgccgagcgcctgaaagtgctggccgccgaagtgtccgacaccctgtacctggtgatgcgcgtctatttcgaaaagccgcgtaccactgtcggctggaaaggcttgatcaacgacccgtacctggatgactccttcaagatccaggacggtctgcacattggtcgccagttgttgctggacctggccgaaatgggcctgcctaccgccaccgaagcgctcgacccgatctccccgcaatacctgcaggacctgatcagctggtcggccatcggcgcgcgcaccaccgagtcccagacccaccgcgaaatggcctccggcctgtcttcggcagtaggcttcaagaacggtaccgatggcggcctgacggttgcgatcaacgcactgcaatcggtgtcgagcccgcatcgcttcctggggatcaaccaggaaggtggcgtgtccatcgtcaccaccaagggcaacgcctacggccacgtggtattgcgcggcggtaacggcaagcccaactatgactcggtcagcgttgcactgtgcgaacaggcactgaacaaagccaagatcaagccgaacatcatggtcgactgcagccacgccaactccaacaaagacccggccctgcagccgctggtgatggagaacgtggccaaccagattctggaaggcaaccagtcgatcatcggcctgatggtcgaaagtcatctgaactggggctgccaggccattccaaaggatctcgccgacctgcaatacggcgtgtcgatcaccgatgcctgcatcgactggtccgccaccgagaccaccctgcgcagcatgcacgccaagctcaaggacgtattgcctaaacgcaaacgcacctgagcccgcagctgcatgtgaatcaagcgcacacaaaaacgccgggccaagcccggcgtttttgtgtgcggctgtttaatgcttacagcttcgcggcatggcgctggtgacgctccatgtagcgctccacataggaacacgaagggatcacggtgtagccggactcttctgcgaacttcaaggcctcttcggtcaacgcggcagcgatgccacgcccacgcagagcgttgggcacgaaggtgcgatagatatccagggtttgcttcccgaggtccatgtaggtcaggtaggcacgatgaccgtccacattggtctcgaactgatgacctgcctggtcatggtggatggacaacgcctcgctcatcactactcctcgcgggtcttgaatttcgacccctaccttaccgatgtttttccggcgaaggaacatctacgccaccccgtgccggtttcgacaacgagaaaacccatagcgctcacaaccagcacgtagggaatagtaagcaccaatgctgcaatagctcaagacgcgctcgtcatcccctgccgctggaggttacagaaagggcttcgatcaacctgagatcgatagcctgaacattgccggcagttgaagcttgagacgaactgccgctcttaaagtcacctctacatgcgcgaaagatgccggaggtggtaaaggcagacgttagaaaagtgtcatcgtcgatatataaattttcacctgattacccgccccggcacatgcgggccggacctttcagcttggatccagttcccgaaaaaatgaaaaaatctgaacagtttttatacaaacctccaaaagattagccaaaatagattcggcacaagaattttttttgcttcttgcgctacgtcagtttacttactacaagtaatgagtagtatgtacgccggctatcagctcactctgagaaagtagccatttaatagaaagtccttgaaggggaacacgatgaacaacgttctgaaattctctgctctggctctggccgcagttctggctaccggttgcagcagcgtctccaaagaaaccgaagctcgtctgactgcaactgaagacgcagcagctcgctcccaggctcgtgcagacgaagcctaccgtaaagctgatgaagctctggctgctgctcaaaaagcacaacagactgctgacgaagctaacgagcgcgctctgcgcatgcttgaaaaagcaagccgcaagtaataatccctcggggttgttatcaagccgatccattcttgggtcggcttttttattgcctgcgttttcctgaatccgggcaataaaaagcccgccgcagcaccaggccggagcgggctcttgatcgggtagcttattgctgcagatcaaccggcgtgctggacgccaccggcgcattaccacccggaacgccaatctcggtcggcaggccatcttcagctgcaaccacgtcacgcacctgatcccaattcactcgcaggttattggccaggtcttcacgcttgagcaaggcgttgatgaccgcggtgtgcttgtcgactacagaaggggtgccatcgtcattgagcggtgtatgcgcttcgagatagaccttgccgccgctgctgccgaacttgtaggcgtcgttgagaatacgcaccgacgtccccaccggcaccatgccggccatttccagcacattgttgttgaacatgcggaagcagccgtggcttgtacgcgtgccgataccaaatttcatgttggagccgtggatcagatagcccggcgtacccaaggtgaacttgaacggcccgagcgggttgtccgggccggcgggcaccacgttgggcaacgggtcgccattggcagcgtgctcggccttgatcgatgccggtggcgtccaggtcggattgggtgtcttggcaatgatgctggtgtgcgcaatcggcgacccccaaccttcacggccaatccccaaagggaacgtatagacgacgttctgtcccttcggatagtaatagaggcgatattccgcaaggttgatcacaatgccctcacgtgggccgggcggcaggataaagcgtgtgggcagcacaatctcggtacccgcgccgggcaaccaggcatcgacgccagggttggccgcgaccatttccgaatagcccaggtcataggtagtgcccaggtcggcaaacgtatcttcgtacttggccttgattacctggacctgaccgacgatgtcctcaccgggaggcggcaaaggcaactgcaaggctgccgccggaccggccgcgcagagggcagcgagagacaggcagcaggtgacgacggagaggcgcgacaacatccggaaaatccttcgcagaacgacgggtaggaaaaaactgattgtatacgtgaagcgcccttcaagcatcaagcggcccgcgtttacagctcgaagcgcagctccggccagattggcggcgtgccgcgcttttgcgattcgagaatggcccgacacaaggggcatagccgctggtcctggaagatcgagcggtccaccgacgaccagcgtggttgcgccggcaacaatgtgccgcacaacgtgcgatcaatcgagccgcccaattccagttgacgcgccaccagatgcaccctgacttcctggcaggcgaacagatccagctgctcgtccggctcgatcagttggtagttaaacagggaccaggcaggacgcgacatcgggggctccaaatcgggggggcgccaccttagccgaaagcccgctgcgagagaagcgtcatagcagcggttttagcgtcggccagacattttccagcaacttgccctgggcaccgactgccgggtgaagctggtcggcttgcatcagctccggatgcccgccaatgccttccaggaaaaacggcaccaacgggatatttttttcttccgccagcgtgccatagaccttggcaaacgcggtggtgtagcgcgggccatagttgggtggcagttgcatgcccaacagcaataccttggcgccgcccgccctggactgatcaatcatcgaagcaagattttgttgcaattgagccggtggctggccgcgcaggccgtcgttgccccccaactcaaggatgacgacatccggcttatgctctgcaagcgccgccggcagccgcgccaggcccccggcgctggtgtcgccactgatggaagcgttgacgactttatcgtcgaaaccttccttcttgagccgttgttccagcagcgctacccaccctttgctggtatccaggccgaaaccggcactgatactatcgccaacgatcaggactgtacccgccgctgcgttctgggccatgcacatcaaggccaggccagcactcaaaaaccacattcgcattggattctccatgggcgcaagcattctcaccgcgcgaaaccttagcaaagtggttcccagcgcggaaggtgaactgactatcctgcacgaactgagcctggaactgaacaagggcgatagcctggctattgtcggcagctccggttccggcaaatccaccctcctcggcctgctggccggcctcgacctgcccagcagcggcgaagtcaccctagccggccaggccctcagcacccttgatgaagaccagcgcgcacgcatccgcgccgagcatgtaggcttcgtctttcaatctttccagttgctcgacagcctcaatgccctggaaaacgtcatgctgccgctggagctggacggccgcaaagacgcccgcgagcgcgccaggcacctgcttgaacgtgtgggtctgggccagcgtctgacccattcgccgcgccagctctccggcggcgagcaacaacgcgtcgcaattgcccgggcattcgccgccgaaccggacgtgttgtttgccgatgagcccaccggcaacctcgacagccacaccggcgagcgcatcagcgacctactgttcgaactcaacaaagaaagcggcacgaccctggtgctggtcacccacgacgagcgcctggcccaccgttgccgacgcctgatccgccttgaagccggcctgatggtcgcgcccctggagccttgatggcacgtttgccgctgttgcgcctgttcagccttgccatgcgtcaattgctgcgcgatgcccgcgccggcgaattgcgcgtgttgttcttcgccctggtggtggccgtggccgccagtacagcgattggttacttcggcgcgcgcctcaatggcgccatgctgttgcgagccaccgaatttctcggcgccgacctggtgctggaaggcagctcaccggcccggcccgagcaaataaaatccggcaccgaactgggcctggatcacgcacgcattgtcgagttttcaagcgtgatcgccacggacaatggcattcagctttccagcatcaaggcggtgaacgagcactatccgctgcgcggagaactgaaaagcgctgccgagcctttcggccctgaaacctcaggcggcggcccaaagcccggcgaggcctgggttgaagcgcgactattgccggcgctgaatctgaaggtcggcgacagcattgatgtcggcatgaagacgctgcgcctggcacgcatcctgacctacgaaccggatcgtgccggcaacttctacagcctgaccccacgggtgatgatcaacctcgcggacctggacgccaccggcgtggtccagcccggcagccgcgtcagctatcgcgaactgtggcgcgcgcccccaggcacgaccgtgctgcaaacctatcgcgacctggtcaaacccggccttgccgccaaccagcgcttgcaggattcgcgggacggtaaccagcaaatcggcggtgcattgggcaaggccgagcgctacctgaacatggccagcctcgttgcggtgttgctggccggcgtggccgtggcactgtccgccaaccgtttcgccagccgacgcttcgacgccagtgccttattgcgctgcctggggctgtcacggcgcgaagcgatgttgctgttcagcctgcaactgagcgtgctgggcctgttggcgagcctggctggcgccctgctcggctggctggcgcagtttggcctgttttacttcctgcacgatttgctgccggccgatgtcccccccggcgggctgctgccggcggttgcaggcatcggcaccgggcttgtcgccctcgccggctttgccctgccccctttggcagcgctgggccgcgtgccaccgctgcgggtattgcgccgcgacttgctgccaatcccttccagcacctggatggtttacggagcagcgctgttcgcgctcggcctgatcatgtggcgtctgagcctggatctaatcctgaccttcgcgttgctgggcggtggcgtggtggctgcgctaatcctcggcgggttgctgttgctgctgctgcaaagcctgcggcgtttattggcgcgcgcctctctgccctggcgtctgggtctgggccaattgctgcgccacccattggcggcggccgggcagtccctggcgtttggcttgatcttgctgtccatgggattgatcgccctgctgcgcggagagttgctcgacacttggcaaaatcagctgccaaaggacgcgcccaactatttcgccttgaacattctgcccgccgacaaggatgcgtttggagcccggcttctggagttgcaagcgcaggcagcgccgttgtacccggtggtaccgggtcgactgatcagcatcaatggtgcgcccgtgcaggagattgtcagcaaggactccagcggagaccgtgccgtgcaacgcgatttgagcctgacctgggctgccgatctgccaccgggcaatgtcctgaccgcaggttcctggtggtcgcagcaaccaggcgatgaaatcccgggcgtgtcggtggaggccaaggtggccgaaagcctcaagctaaaactcaatgaccatctggtgttcacggtcggcggtgaaaaccgcgaggccagggtcaccagcctgcggacgatcaactgggacaacttccagcccaactttttcatgatcttccaacccggcaccctgaaggacctgcccgcgacctatctgaccagcttctatctggcacccgggcatgaccagcagatcgtcgatctgtcccgggcttttccggcggtcaccatcttgcaagtcgaagccttgctggagcaattgcgcagcatccttgcccaagtgaccctggcggtggaatacgtgctgttgtttgtgttggctgcgggaatggccgtgctgttctccggcttgcaggccacgctcgatgagcggattcgccaaggcgcgctgctgcgggcactgggcgcggagcgcaagttgctggtcaaggcccggcgcattgaattcggcctgctcggtgccgtcagcggtctgctggcagcactgggcaccgaattggtaacagcggtgctgtaccgctacgcgtttgatctggcctggcacccacatccatggctgctgctgctacccgtgatcggcgcggtgctgatcggcggtgccggggtattcggtactcgccgtgcgctgaacgccagcccgttgacggtactgcgtgaaggctaaaatgccaacggcccgcatctctgcatagagtgcgggccatcatcacctacttcacatattcgatacgggtgatccaccagcacacgtctccgccaggcgtctgcacgatggcctcgtcgtcgacttccttgcgcagcaacgcccgggccatgggcgagtcgatggagatgtaatccattcgttcgtaaatctcatcgtaccccacgatgcgaaaacgcttggtctcaccctgttcattttcaatatcgacccaggcgccgaagaacactttgccctcctgctccggcatgtactccaccacgcgcatgtcttcgaggcgcttgcgcaaatagcgcacccggcggtcgatctcacgcagcagcttcttgttgtactggtaatccgcgttttcactgcggtctcccagggaagccgcccaagtcactttacgtgtggtgtccgggcgtttttcacgccacaagtaatccagctcctttttcagcgcttcgtgaccctctttggtaatcagcttggtactcaaacgctcacatccccgggcagtgtccaatggtgccgatacgctgaggtatcaatccttggcgtcggctggcaggggtgatgataaatgaacccggaaaagtagccagaccacacaacacatctcttcaaccctgaacgtccagtgcctggtccagctcaagaagcgagcctcgcaaacgctggcgcataacggtcaggtttgacatcgccagcgccagcttctcggtcttttgcccagcttccagttcctgatcccgcaattgtgcatcgcgcctttctaactcaaggctcttctcatccagttcgctttgcgcctgctgcaggcgagcctgccaatgctcaagctcctgttctcgctcgacgagcgcacgtttttgttgcgtaagctcctgagcgacctttgcaagattggtgagtgtgctgtctacctccagcaatgaggcctattccatcggggcaatctgtttcggcgaggggggctcgctgcactcaaccttagccggcggagtattgacttcaaccggttcttgctcaggggctgtgaccactgagtccgtcggttccttatcggcaagctcctcatattcgggttgcggggttggctgcggcaggctcgtgggcctggtcggcaccaccgtttgcgaggagaagcgaatggacggcacgatcaacgcagcgctttcgattgccggcgacgcgggagcagtcatacccagggtaatcaccttcatcaccagggctttcttgataatcactgagtggtgatcctcgggcctggccggcggtaacttgcagcctttcaattcaacgaaatgaaagggaatcgaacgctctgcaaccacctcggccttggtgccggaggctgcagccatcgtcagaatttgcttgaagacttgcatggccacttgcaggtcgtccttggactcgacgccccctaaaaaataccgatcaagttttttacgcatggcagcgatgtaaaccctggagttaccgggttcggtttcttcatccaggctgtaaaccagaaagttggacgcggtttgagcgacagcaaacccacagaggagtgcaccattgaccggcgcatcctgcccgctgtgttcaagaacaagagtacgtagaagcatcatggtaatcgggcctcatgacaaaagagcaaaccttacataaccgtcggataaacatccgactatctataagcctctaaacagcacaattgtttcagcaagttatccgatttggcgtaggacttttctgttaaacgcgtccccacgttcccaaaagccgttattaaaagtaggctttttaaagctcatccgtttaacgcgagcatgtttcctacaccttgccaaatccactcggtaaaaaaatgctcgaagtaagcggcctgacaaaaacactgggcaagaaaagccttatcgccaacctttcattttccgttcaacagcaggagtgcatcagcctcttcggagagaacggcgccggtaaaacaacgctgctgaatctgatttcgggactggtaaaaccttccgcaggacagatcaacatccagggaatcaatacccagtcccacccgactcaagcaagaaaaatactggggtaccagcttcaagacggcctcaatcatcacttgatgtctgtcaaagacacactgggcttcattgctgccatccgggggttcagcggggcagaaaaacgccgtcgtgtcgatcgggcggcgaaccgtctggagttgttgcctgcgctgaatgctccagtcgatgcactccccatcagcatgaagcgcaaagtagccatcgctcaggccatcctgcatacacccgatctgctattgctcgacgagcccaccgaaggcctgccggctgatcagcgacgcaagttcagaacattgattcaacccttggccgaagagatgactgtcatcattgcctcgcgtcatggcgacgagctctccagcctttgcacgcgagcattggtcatcgcaagtggagcgctggtctctgatactccgatgtctgagttgcagcgcaactctcggcacttccaggccgttaccctcgcggcaagtaccccattggacttgctggcgcttgctgtattacccggcgttgcaggtatagaagaggatcggcatacacccggcacggtgaccgtactcgccatgccgggacactccatttatccccatgtaaacgcactcatcacccaccgcggctggaacataacctccatgagcctcgaatcgggccgcctggacgaagtcgttcgccatctgagccaagaggtgtcgatttgaaacgcctgcctatcattttcaaacgtcagcttgccagttacgcctgtgcaccggggacctacgtgagtgttgcggtcttcctttttctgtgtacagcgctggggctctatacaaaccaatggatggagcgcagtaacagtgacatgcatatcttctttgaattacatccctggctgtatttgttgctgatacccacactctccacacacctgtggtcagacgaacaaaacacaagcttgcgcgacctcatgaaaacactgccgatcaccgctgccgaaatcgtgatcggaaaattcctggcggcttggactgtgtgtggaattgcattaacgttgatgttcccggttgtcattgtcgccaactacctgggtaccgccgacaatatcgttatcgcctcgcaatattttggcagttggttgttggcgggcagttatgtgtccgtcggttgttttatcagcgtggtcacgcgccaacgcgttgccatttttttgctgacatcgggtttattactcaccatcagcgggcttgcttcgatactggatgctcttgatcaccaggcgcccatttggatcatcgacagtttgatttcgctcaatccgctctctcgcttcggcagtatcgacaatggaaaactgacacttcgtgacagtttgtatttcacgagcatgatcctcgcgtttctcagtgcaacgatcgttacgctcaaccacaagtccagttgagaaggaaagcgtcgtatgcgctccactctactcaccggtatgacgctcatcgtcatgtcgctgcttttcctggcatttaatctggtctggataaacagcctgcccgatgttcgctgggacttttcagcgcagaagaagtacaccctatcgctgccggcgcggcaattgttgaaggtcatggacgggccgctggacctgtattacttcaattcacgcaatagccccaaaagaagccaggcgatgaaacgctatggcgaacgcgtagaggacatgctcaaggagtatgaaaaagcggccaaaggcatgattaacctgcatatagttgatcctgctccattttcagaggacgcctacaaggccgggctgttcggccttgatgacaagcaaggttttctaggcttgattggtacccgcgcgggccaggtcacacaacgcattgacgtcttcaaccctgagcaggaggacgtacttgagtatcaaatcagccatctgatctataagttggtacatcctgaggcccccactgtcggcttgttatccgggctggccctggataaacctgcaggcctgttgctggagcaattgcatcagcactttaacgttgtagacctgaaaccggatatcgaacagattcccgggtcgataggcacgctcatggtcgttcatccgcacgcgttgcccgagcgggctttgtatgcgatcgaacagtttgtattgaggggggccaagttaatggtcttcatcgacccgatgagcgagatggcagccaacaccgggccaatggactcaaagcttgatggcctgttgactgcctgggggatacagatgccgaatgaccaactgctggtcgacagcctttacgcgacgtccgcttcattcggccctggcaagccagcagtcgtgcacccagccaggctgaatttgccgcgccaggcgatggcagcaaacgatatcagcacctgggcgctcaactcggtgctcgtatcgagcagtggcgcgctttcacgcatcaggaaaagccgtactgccttaacccccctgttgtttagctccaggcaatcagcgttgctggacgccgggcaatttgcatcagcgactgcagttggctcactcatcaaagaggtctcggcgcctgcaccaccgtatctgatagctgctcgcctcgaagggcctgcctactcagcatttcccgatggcatcccggggaatccgcctggcttgcagaaagccacaaatatccaggtcgtagtggttgccgacactgatttacttgcggatgcggtcatccgttctgcgcccaacgacaacgcactgtttgtcttgaatacgctggataatctggcggcacccgacgcgcttgcgaacgtgcgccccctcccgctaaccgatcaatccctatacccgctggaacaaatgcgcgaggcagcggcacaggcctacgcgcaaaaagccggtgaaaggcagcgacagcttcagcagacggaacaggaatggcagcggttacccccaaggaacactggcgttgtcacccagactgttgataccagcacgcagttgcaagcgctcaacaaagaacgcctgcggctccccatggagttgcaggcgttgaaggtcgaggcttttgcgcaagtgcatcgcacagagcgcaacctgaaactgctgatgacactcccggtgccactgctgttatgcctgattgcctggagactgtttctgaaccagcgacggcgccgagcagcatttgccagcgcatttcactgatcgctcaacgacgggcaatcaacccttgccgggcaatgcgtgtgagttggcgtatgacttcttcagcgttgtcggcactgggtgcctggatgaccgcaaggtcaaagctgttattggcaaaacgagccaaggaatcgccatcttcaacaaactggatgaggaatgccgaaggtcgccctgtgcggcgtggccatccatcgaggtaacgcaacagcgtcggctgatgcttgccgcccagaaggattttcggattgcgttgagtcaggtccgcagtgatcggggccaggcgtatgagagggcgtagtgcattcatcgtgtcgtgtctctgcctcaaaagtctgcgggcaggtgagaggcaacaccgaaccagcgctttagcggaatttcgaaacccgcaccggcaagtgcgtatttctgtcgggctgcttcgagtccctgtggcgccccgcaattagctgtttaaatcggcgcatgagaggcatcctagagaagccgatggtgccgtgtcaagaatcacgagcaacgaaaaggcccgctcacggcgggccttttcaggtgttgcgtaaagactttgcgcgatactcagtgagcgatggcacggtcgacggacagcttgccagcaccttcgaacaacaccgccaacgcgcccccaagcaaagccagtgcgaactcataaccgttgttggccatgaacaacccgttatggatatgcaccgaaaagattgcaaccagcgacaaaaaggccaggcccagcgctgcaggacgcgccaacaggccgatgatcaaggccaggccggcgaaaaactcagtgcctcccgacaacaccgccatcagggtgcccggcgccaggccgatgctctccatccattgcgcggtgcctgccaagccaccgccgccaaaccagccgaagagtttttgcgaaccgtgggccgcgaagatgatgccgacaaaaatacgcaggacagtcaggccatatccggcacgggtggacaggacgcggttgatcagtgggctcatggtgataatccttttcaaagtaggggttggttggccgctatattaatcggattaaacaatgataaaagcgcaaaaaatgccgaataaatatcgatattttcgattatttccgtgaggcaattttcgctgctggcggctcaagggactccctttcccgatcaaacgccaaatagtatttattgacgctattcacatagctgacgccgcccattcccacttgctccattgcaatgcgttcaacctggaagaaccactgattcgggttcaacccccggcgacgggcctccgcacgcatgccctgcacccgctccggccccatgttgtacgccgccagcacaaaggccatgcgctcacgctcgttcagttttgggctggagaaaaattttcgacggatcatcgccaggtagcgggcgcccgcctgcacattgctgtcaaggttttcgatattgttcacacccacccgctgcgctgcggacggcgtgatctgcatcaggccggtcgggccaccgctgttgcgcgcgccggggtccagtgcggactccttaaaggccagcgcggcgaggttcaaccaatccataccctgctcgcgggcatgcttttgcagcaccgggcgcagcttttcgaggcgctggcggtcggcgcgggccagcggattacgcacttggtagaggcgacgatagatgcgttgaaaggcaacatcctggtcggagggcgttcgataggtcttgaggaatcgatcgatactggcgcgcagcatcgaggcgtcctggcgcacgaaccagtattcatcacccggctcgctgattgccacctgtctgtcaaaccgcagcttgggcaagattttcgaccagcgttcggcgatgggtttttcaacgatggtcaggtggaagatcccggcctggaccatctccagaacatcttccacggccagggtcgggtcgacccattccacttttaccggtggccgcttgtgcaaagccaactgttggttgacctggctgatcgcatcggccgccgcactgccagtggtcagcgccagggtgcgcccggacagttgctccagccgggtaaagcgccgctcacccttcacgcccaccagccacaacggcacatcgctggcaatcgggtcgctggtgctgatcttgtgcgcggctttcacatccagcaattcacctggggctaccaggtcgccttcaccacgggccagcgcgccaagtagctggtctttggccttgggaatgatcttgaggctgatttcctcaccatcacgggcgtggccgttcaggtactgctcaaaggcacgcaggcgatggtattcaacaccaatggcctggccctggacctcaccggaactgtttcggctctggttgaccaacacacgcagggtgcgacttgagcgaatttgcgccaagtcgcgcactttaccgggcttggtcacttccagcggcccgtccagacgtgcgaccgccgccatgggcagcaataacgtcaggcacaacataagcaacgccgagggtcggatcatccgctctccggaaagaatactggccagtgccgtcgtgaaaaacgagacgctggaggtcagaaacagagcgctttatgcgcaggctttgcgtgcaacggcggcagggtggaagactttcggtaaaccacaatgtcgcttgcgacgttcaaagacagctataactcgttgtagttcttagtttttcttataaatctacagctctgatatgctttccggccgcaggcggagatagcaccatgcaactcattgatatcggcgtcaacctgaccaaccccagtttcgacgagaggcaccaggccgttctcgaccgcgcctacgccgccggcgtgcaacaattggtgctcactggcaccagtgtcgacggcagcgaacaggccctggaactgtgcgtgaaactcgatgaaagcggccaacgcctgttcagtaccgccggcatccacccccactccgccagcgactggcacagtgatagcgcgcgacgcttgcgcagtttgctcgatgaaacacgcgtgcgggccgtgggtgaatgcgggctggatttcaatcgcgatttttcaccacgcccgcagcaggaaaaagtcctcgaagaacatctggccctggccgttgagctgaagctgccggtgttcctgcacgaacgcgatgccaatcaacgcttgctggaaattttgaaggactaccgcgaccacttgactgccgccgtcgtgcattgcttcacgggcgaacaacaggcgctgttcagctacctcgacctcgacctgcacattggtattaccggctggatctgcgacgagcgccgtgggactcacctgcatccgcttgtcagggaaatcccccgcgggcgtctgatgctggaaagcgatgcgccctacctgctgccccgtaccttgcgtcccaagccgaaaaacggccgcaatgaaccggcctatctgcctgaagtgctgcgcgaagtggccctgcatcgcaacgagacggttgaagacctggccacacacagtaccgcctgtgcccgcacgtttttcgggctgcctgccgtggattgatgcggcgcattgacccaggtcaaaaccggcgttctgagtagcggcacaataatggcaccttgccaatgctgtttccgctatcagagaaaaccttccatgggtgcctggcttagcaatatctcgctgaaatacaaattctgggccgtcaacgcggtcgctttcatcaccacgttgctgctggtgctgtatgccgtgcagcttgaacaacaggcgcgcagcgatgcatcccaaacgtccgcgcaggcacaggggcgattgctcaatgcctggcctgccgacaaaccgctgcccaagggcgagcaatggctgacgtttgcacctggccaaatcccacagattgaacgccaggatctgtcagccctgagcacagccaacggctgggtcgaactcaatcgcctgccgctgttgggtgaaaacccgctgatcggcgccgaagtcatcacccgtgccgatgggcaacaggtcgccgtgctggcctatggcgccagcttgggccaggtgttcggcgagcgcttcgccaactacgccgtggcagtgctgattttgatgctggcgatgctcggcgcctcgcagttgctgatccgcttcctgctcagccagctcaatacgctcaaggacgtgatgctgcacgtcgaaaaaaccggcgacctttcagctcgtgtgcctttggcgtgcaaggacgaggtcggtcaaatggccagcgccttcaacgccatgcaggccggctaccagcgtgtggtcaacaccgtggcacgcaccgcgcgccaactggacgaaggcgccgcgcgcttggccaccagcatgaacgaggtgcagcacggcatgctcggccagcaaagtgaaaccgaccaggcggccaccgcgatcaatgaaatgaccgccaccgtctaccatattgcccagcacgccggcgccacccgcgacctgtcccaaaccgccgacaccctcgccggcagcggccaggcagtggtaacccgcgtgcaacgctcgatcgccgggctgtccactggcgtgcagcaaacggccgaaatgatccagaaactcgccgaggacagtcagaaaatcaacggcgtcgtcggcgtgatccacagcatcgccgaacagaccaacctgctagccctcaacgcagccatcgaagccgcccgcgccggcgaaatgggccgtggttttgccgtggtcgccgacgaagtgcgcaacctcgccaaacgcgtgcaaagctccaccgacgaaatcacccgtatggtctctgcgttgcaagccggtacccgcgacgcggtggacttcatgcaggagagctcattcaaggccgacgactgtgtgcaacaagcccaggaagccggcgcggccctcgccgagattaccggcgccgtggcgcagatgcgcgagagcaacacccagatcgccgtcgctgccgaacagcaaagccacgtcgccgaagaaatgaaccgcgcggtggtcagcattcgcgatgtgacggaaaacaccgtgcaacagaccgtggactcggcgaccaccagcaatgaactggcaacgctggctggggagttgagcaaggcgattgggcaattgaagctgtaaaaccttttaacctgtaatcctgcacctacacccgcccttccatttgccgaagttttcggcgaaacgccctacccgtttgcgcgatttgcgctgacttcttttccttacgaacctctgcaaagtcctccgcctgatcacacagtgcgagggattgcagatggtttttttcgttagtgccttggcggtcaccgctcttcccctgtggaggcgctgcgaatgaccaacgctgcccacatcacctttatcgaacacgaactcaacggctttcatcagagcttggccgagtatcgccagcagatgaacgcctggtattcgcgcgcgctggatgccgccagccatgccgcggatttgccctcgctgctcgggatggagcgggtgctacggatgggtgactcacagaccgtggtcagcaccaccgacccggatgttttgggcatcgtggtcatgtgcccgctgggcggcgagctgaagatcgagagcacgtttgaatcggcgtacgacgtgccgattggcaatatcccggtggaagtgatcgggctggatgacggcagatccaccgtgatcatgctggacgagcacggcaagggttcgcaccattgcgcggcgggtgggcgctaccaggtgcgggtgcaaggtggcgttaccgatgaacaggtggacgcgctgtttgcttcctacgccgggttgacggcggacctggagcagtggctgcgcgcgcaatggaaagacttcaaacccttttggcagcagtcgaccgccagcgcgatcggcagcggtgtgttggccggcagttgggcagcgatcaaggaggtgtgggacagcatcaagctggtgcaggcgattcttgaagacccgttgaagtttggcgagcaactcggtgaccaagccgcccagttggcgcaactggccaccgacgcgcctcaggtcatggaaaaagccatgttgctcgccagtgacgaggccgcgctgtacctgatggtgcgcaccgcgatgctctggctcgacgcactgccaaccggcgaaatggccgaggtgggggccgggtttgtggtgtcgttgctgatcgatctggtgattggtgcggtgctgactatcgcactgccggcggcgggcgtggcttatctggggttgcggctggtcaagcatggcgtgcggattctggaggcggcggtggggtttgtgcgcagcctgctcgggattttgaccaaattcatgcaggcggtggatcgctacaaggccgtggcggttcgcggcgtggtcggcggactgaagcaaggcacgatgcagatgcgctggcgggcgcggcagaacacggtgttgaggcagaaagagcacgtggatgatgtgcctgcctcggggaaaaaccccgcaggtgacgcagcggcaccggctgataaaaccgtgaccaacggttgcccggtgtcgatggtgacgggcgaggaattactgaccctcgttgacggcacgctggacgggattttgccgttcgagtggacgcggttgtatcgcaccagtgccgtggaagtggattgcgggttggggtttggctggagccattcgctggcgcagcggctggtggtggccggtgattcggtggtgtggacggatcacgaaaatcggtcgacggcgtttccgttgccgacggcttcgcggcctgcgatcaccaacagcctggctgaagcggcgatctatctgggaacactccccgatgaactggtgctggcgcaggactcgcggttttaccactttcgcgacggtgtgctgacggcgatcagtgatgcgtatgacaactgcctgcaggtttttcgggatcggttgggacgggttgagcggctggacaatggcgtggggcgctcgctgtttctgcgctatgagcgtggccatattgtcgccgtggagtaccagattgaacgggccgaggggccgggtgagtttgtctgggtcactgagcagatcgttgtttcctacgcctatgacgtagcgggtcagttagtttcggcgaccaatgcggtaggtgaaagcgaggtttatcgatacgacgaacagcacgtcattcttgagcgtcagttggccggtggggcgagtttcttctgggcgtgggaacggtccggcaaggcggcgcggtgtgtccggcactgggccagcttttcgcagatggacacgcgatatgcctggggtgatgacggccaggtcacggttaaaaacgccgatggcagccaggaagtctacgtgcatgacagccgtgcgcggctggtgcagcgcattgatccggatggcgccgagcacttcaagtcctacgacgaaaagggccggttgacggttgagcaggatccgctgggcgcggtgacggcgtatcagtacgacgacgccgggcgtttggtggcgttgtttcccggcgaggatgaaccgacttcctacgagcatgacaacggtttcgtacgggttgtgcggcgtggtggggccgtctggaagtatgagcgcaatgatcagggcgatgtcacccgcaagacagatccctccggtaacgtcacggactacagctacaacaaatacgggcaactgaccggggtttggtatcccgaccacagttgtcatcggttggtgtggaatgagcgtgggcagctggttgaggagcaactgcccaatggcgggattaagaggtatcgctatgacgacctggggcggcaggttgcgcgtgaggatgaatttggcgcgctgacgcagtatcaactggacagtgttggccggctgattcgcattgtgttgccggacggcggcacacgggaatacagctacaacccctacggaaaaatcaccgctgaacgtgatgaactcgggcacatcactcggtacgaatacggcaacgggctgcacttgatcagccgccgtatcaatgcggacgacagccaggtcaagtatcgctacgacaacacgcggttattgctgaccgagatcgaaaacgaggtcggcgaaacctatcagctggattaccaccccaacggcctgatccagcaggaaaccggctttgacggccaacgcaccgcctatgtctacgacctcaacggcaacctgcaggaaaagaccgaacacggcgacgatggcagtcagctcataacccgttacgagcgagaccacgccgggcgccttgtaagaaaaacccttcctgacggtaaatccgtcaactacacctacgaccgccagggcaacctcctcggcgtcaacgacgaccactgggcgctggcctacgagtacgacagccaaaaccgcctcaccgccgaacaccagggctggggcaccctgcgttatggctacgacgcctgcggccaactgaaaaacctgcgcctgccagacaacaaccggctcaccttcaaccatggaaaaggcggcgacctaagtaccgtcgaactgaatggtgaaaccctcacctcccatctgttcaaggccggccgcgagcgacagcgccagcaaggccagctcatcagccactacggctacgacgagcaaaaccgcctgcacgcccatgcggtgacccagcaaaggcacgatctttatcagcgccactacgactacgacaaaaccggcaacctcagccgaattgtcgacacccgcaagggcgagcaccactaccgttacgaccccctcgcccgcctgacccgcgtcgatcactcacaagacgaacaggaacgcttcggccacgacccggcgggcaacctgctgatgcaggaccgccccggtccggacatcgtggcgggtaaccggctggcgatacagggggatcatcattacgactatgacgcgttcggcaatctgattcgcgagcgacgtgggcgtgaacatcggttaatcactgaataccgctacgactgccaacaccggctgatcggcatcacccgaccggacggccaaaccgccagctatcgctacgacccgttcggccgacgcatcagcaaaaccgtcgacggcaaaaccaccgagtttttctggcaaggcgacaaactcatcgccgaacaccacgccgatcgccatcgcagctacatctacgaacccgacagtttccgcccgttggcattactggaaggcttcggcccaaaagccaccaagcccttctattaccaactcgaccacctcggcacgccgcaagaactcaccagccctgacggtgaactcgtctggtccgcacattacaaggcctacggcaaaatcagccggctggacgtcgaaaaaatcgacaacccgctgcgcttccagggccaatacttcgaccccgaaagcggcctgcactacaaccgccatcgctactacaatccggatctgggtcgttatctgacacctgacccggtgaagctagcgggtgggatcaatgcgtaccagtacgtgcccaatcctacggggtgggtagatcctctgggcttagcttgcgcgcctgaaaactgccctcaattacgcaccagaagtacttgggaattcaaccccgaagtagatctcgattggcgaaaacaaagcggtagtagttatgaacaaatgcatggaggattggatgaagcattccgtagaacgggtatttccaaaagcgaattcagcgtatccaaatggggtaaagatcagaatggaaagtcgtttcctacagagtggcgtgtacagagaggtccaaatagaggggcagaagtgaatattgacgaccctatgcttgttccaagtaaagaaggccctaaatcaccccatattggttatcaaactccaggaaaaagagctggcggtggtgccaagagaggtcacatacttctagagttggtacccgttagccgatcaaaaataggcatgccctgatgaattatttggaagaggagataaaccaggctttcgttacgttgaacatcgactacagggagcttggatctgcagagattaccgtcttgataaaaaacctgaccaaaatattctttaaatcagaaagcaacgtactggacccggtagaacttaaagaaaaaagtgcggagcacaatcctgatttttggaaagaaatacaccagcgcatacatacaaaagatctgacattattgatattcgactcaacgtatagcgcttgggaggtaaaaagctcagaaaatcttgtatcaattctaggcgaaacaactggatttccattttgggtgactgatagcaaacgcacgtttttggtacacatggatgaccatgactgtgtaatttgggcttgaggccatttaccaccaattgccttctatctctcccatagccaaccccaattcgccgccccgcccacccccacctaaactccgcccataacgtttcaacggacagaggacacaccaccatgggcaaacgtcaccccaacctccccgcctggcaatggcgcaactacccgcaaaatcatcagcacccgaccaacctggcgctgcacctgattgcagtgccactgttcatcatcgggtttctgctgattgtttccggggtgttcagtctgagcctggtcagtttcgccgtcggtgtgattggcatcttcgccggtctggcattgcagcgtcatggccatagcctggaggctcaggccagtgagccgttcagtgatcgaaaagatgccgtgcaacggctggtggtcgagcagtttgtgacctttccgcgttttgtattgagcggtggctggtggcgggcttggcgccagcgccaccggcattgagggtcaggcgaagaccaccacggtttggcggctgatggcgatgagttcgccggtcgggctccagagtgcggcggcggcgtggccgtagccgtcgcgggcgtgttcgatattgacgtagtactggcaccagtcgagggtggtcaggttttgcaggggctggatgaactcgatggtccaggtcagtgtgctgcccggtgccggttttttcaggtgcggcagcagggccgggggccaggcgtcgaccagtgcaagaatgtgtgattcggtcagcggctcttcctttacatcaccgcgcaaacgcacccaaccgcccatatcgcgggatttattgccggtgaacggcagcccgccaacgctccagcgcatcgccacgtgcttcatgaattcaggcgtgacgcccttgatatagggcagttcctggcattcgtcccagtgcttgaaggtaggcggtgcttcgctggcgacgtcaatttccgactcgcgactcgcaccgaagctggcttgaaccaatgtggccacttcaccgttctgcaccacacggccaagcagttggctgacagccttgccttcgcgcaacacttccacctgataactggcgggcacatccggcgccaccgggccgacaaaagtgacggcaagggagcgcaaaggacgaccttgcggcacctgagcgcgcaacgcctcgtattgcaaggcggccaccaggccaccaaatgtggcacggccctgcgcccattcggcggggatggtcacctccagcgggttgcgacgggcggcgtcgagcaaatcaaagaagcgcatggcgacctcacatcaagaaaacagatgcaccgatcttaaccagcgagcctacacggcacagcgcctattccggccaaaagccggaccgtttcagaaacaatcctctctgagcttgtccagcacccggtccgcctgcccctcggctttggccatggtgcgaagccaaacggcaacacaaggttgcaggtcggcttgcagttcagcctgcgccagccattgccagcaatcatgccaatcccctagcgcgccttgggctttcttcaagcgcgacatggcactggcggggagtttgtccagctcgggataggcctcggcggcgtaacgcacgcgtttgatcaacaagcgcaggcgatggcggtcgtggccgggatctttcaatgcctcgtcgagtttctgccattgcttgcgcaggcgtttttcgatgcgcggacgcaggcccttgagcaatttctgatgttcagaggcgcggataaagcgaggaaaagcatcaagaatcaacaacaggtgcgccagctccgggctttgcgccacctggcgatacgcctcgggctgcaggcgcagacgccggtcggccgcttcgtgataaccctgctgatgcaagtacgccgccagcacctcacggtcacgcagcggcgtagtcaattggccgaccgtccgggcagacaattcaagctgttcgacgcccggcaagccacgcaaagggcgcaacaagctgcgcaggcgccgcacggtggtgcgcaggtcgtgcaaggcttcatcgtcggtaacggcagcgaggcgagcctggcagctcagtaaccctacttccaggccaatgacctgagcgactaactgatcgaccaaagctgacatcccttcctcccctgacgatgaaaaccctgcacggcgctacggtttaacgcccggcgcgtgactcacgaatatagaaccgcgctttctcggccttgttggagcagccttcaaacgcttcgaattgctgctgggtcttggcgcccgtcaacaaagacagcgccttggaatagctcaccgtaccggcaaaaccttcggccttggccaggtccagttcatgccaagcggcatccaattgcgtgccacagctgtcgcggtacgcggttttcccggcacaaccggccagggccaacacgatcacaggcacacacatccaggctttcatcgatgacacctcaaataaagaaaaacagtcgtaggctgtagacgttgcctacaggaaaaagtgccttgtcagtcagcctcgaatctaaagcgcctatcgccagagcatacccgagcgccgtggttttcctggaaaaaatattgccggcctttgaagattgaagcgcccccctcaatgggtgcattgtgggcacctgccttggaaggaacatcgacgatgaagaaacgtgttgccttggtactgggttcgggtggggcccggggttacgcccatatcggcgtgatcgaggaaatcgaacggcgcggctacgacatcgcctgtatcgccggctgctccatgggcgctgtagtgggcgggatctacgccgccggcaagctggatgaataccgcaactggatcgaaagcctcgactatctggacgtgctgcgcctggtggatgtgagctttcgcctcggcgcgattcgtggcgaaaaggtcttcgggcaaatccgcaaaatcgtcggcgaaatcaatatcgaagagttgcgcatcccctacaccgccgtcgccaccgaccttaccaaccaacaggaaatctggttccaggaaggctgcctgcaccaggccatgcgcgcatcggcagcgattcccagcctgtttacaccggtgatgcaaggcaaccgcatgctggtggacggcggcctgcttaacccgctgcccatcgtgccggtagtgtcgagccactgcgacctgatcatcgcggtcaacctcaacgccaccaaccagaaacactaccatttgccggtgatcccacgcccgccggcattcaaaagccgtttcaacagcctggcgaaatcattgggttcacacctgccatttcggcgcaaacaggccgagcagttgatgaaactggagcaggaggcgttgcacgcccaggccgccgagatcaacccgtggctggactcggccgagcccgaagcccagcagcctgctgctgcaccggaaaaagaaggcgcccccaaatcggcgaccggctcgttcatcatcgacaacgtggggccggcgtcactgctggacctgatcaaccagagtttcgaagtgatgcagacgtcattggcacagtacaaaatcgcgggctacccgccggatgtgctgatcaacgtaccgaaacgggtgtgccggtttttcgagttttacaaggcgccggagctgatcgccctagggcgggaaattgcgagtgacacgctggaccggtatgagagtgagcagcgctgaaattgtgggtgtggctgatggccttatcgcaggcaagccagctcccacatttgaaggtattcacaattcaatctgtgggagctggcttgcctgcgatggtgcccgttcaggcgccactgcactcaggcgctcaacaaccgataccccacccccgcctcggtcacgataaaccgcggctgggtcggatcatccgccagcttctggcgcagatgccccaccacaatgcgcaggtaatggctgtcttcggtatgggtcggcccccagatatccttgagcaattgctgctgggtaatcacccgcccaggatggcgcgccagctgcgcgagcaccgcgtactccttgcgtgtcagcgccacttcggcgccgtccagcaacacccggcgataagccaggtccacggtcaacgggccaaaacgcaaggcggcttcctgagcctcccccgctggcgcctggcgcagcaacgcgcggacccgcgcgagaaattcctggataccaaacggcttggtcacgtagtcattggcgccgccgtccagggcttccactttctgcccctcactcgcccgcaccgacagtaccaacaccggcaccgtcgaccactcacgaaattcgcgcagcacttgctggccgtccatgtcgggcaggccgaggtcgagcaccagcaaatccggtttgctcagcgccgcttgggccaggccttcgttgccagtgccggcctcgatcaccttgtagccctgggaggccaggctgatacgcaagaatttgcggatctgcggttcgtcatcaatgaccaaaatcgtcgcggtctggctcatggtgtccaatcaaaatccgtggagaaaagagggtagctcaaggctcgcgttccaggccaggctgagtcggcaaaggcaggaacaaagtgatgcaggtgccgcgcccctcgatgccgtcggccacactgatacgcccaccgtgggcgccgaccatgccctggcagatcgccagccccaggccggtgccctgcccgcctcgatcaccgcgcgcggcggtgtaaaacatgtcgaaaatcttcgcgcgctcgtcttctggaatccctggcccctcatcggccacagcgaaatacagctggtcgtccgacacgcccgcattcaactgcaaacgaccgtgaggcggtgaaaaccgcgcagcgttttccagcacattgaccagcgcttgctcgatcaacgccgcgtgcacatagagcaacggcaattcaggcggaacgtcggtggtgacctgcaacggcgccagcactgcgcgcaagcggccgagggcgctgccgacgatatcgcccggcgacacccaatcgcgcgccagcttgagcgcgccgtggcccaggcgtgtcatgtccagcagattctggatatagcgatccaggcgctcggcttcatcgcgggtgccttcgagcaattcgcggcggtcttccagcgggatggcctcacccagcgccagcaagctatcaatgctgccgcgcatggaggtcaacggcgtgcgcaaatcatgggacaccgaggcgagcaaggcactgcgcagttgttcggtttcgccgtgcaggcgcgctgattccagctcttgccccaattgcgcgcgggccagggcctgggccaacggctggctcaatgcggtgagcaaacgccggcgttggccactcagttccagacccggctttggactgacgcccaacaagcccaacgggccctcttctcccgacagcggccaccaccaccaacgcccgaacggcaaggtaccggtgcccatgccggccggctggtcatgttgccacgcccaatcggcggcggcgcgctcggcctcagtcaggttcagtgcagcgcccgtctcgaccttccagccgccctgcccgtcgcggttgaccaggcacaaatcgaggtcgctccagccttccaaatggtgggccgcggcgctgaccaccgcttggcggtcggtggccgccgtgagtttgcgcgacaggtccagcagttcgctggtttcttcctgggtgtcgcgcaatgcctgcaactgccggcgctggcgcgcggcgaggttgccggtcaaagccgccatcagcaggaagaacaacagggtcagcacgtcctcttcgcgctggatggcgaaggagaaattcggcgggataaacaggaagtcgtaggtcaggaacgacaacgccgcacacgccagggatggccccaggctgctgcgcaccgccaccagcaacacggcggcaagaaacaccagtgagatattcggcagcggcagaatgctcgacacggcccaggccagtgcggcggccactacggtcgccaccaccgccaggccgtaatcgaaccacaccagaccccgcacgtccggcaaacgcggcggcgcgggaatgtcgtcgctgtcgagcacgttgatttccaggccccgtgcattgcgcagcaggcgcgccgccaagccgccgccaaacaatcggcgccgccagcgcatccgcgattgccccaccagcagcaggctggcgcggcgctcggcagcatgctggatcagcgtcttggccacctcgccggcacgcagcaacaccacttccccgccaagccgctcggccaattgctgtgcgttttgcaggcgcagccgcgactgctcatcgcgcgcgcggccgttgtcgatatgcaccaggctccagggcaaatgccgccgctgggccacacggctggcgtgacggaccaggcgctcggcctgggcatcgccatccacacccaccagcaggcggccgcgcaccgccggtgcggcttggccgagctgacggtagccttgggccaagtcgtcatcaacatgggcggcggcggtctgcatcgccaactcgcgcagggccatcaggttggtctgggtgaaaaaggcgtcgatggccgcgcgggcctgttccggcacgtagactttgccgtcgcgcaggcgctccagcaactctcgcgacggcaagtcgatcagcaacagttcatcggcttcttgaagcacccagtccggcaaggtttcacgcacctgtacacccgtgatgccacgcacctgatcgttgaggctttccaagtgctggacgttgaccgtggtgaacacgttgatgccggcggcgagcaattcctggatgtcttgccagcgcttttcatggcggctgccgggcgcattgctgtgggccaattcgtcgaccagcaccagcttgggtttggccgcgagcaggccgtcgaggtccatttcttcgagcatcacgccgcggtattcgctgcgcagcaaaggttgctgcggcaggccgctgagcaaggcttcggtctcggcacggccgtgggtttcaaccaccccggcgatcaggcgtacgccctggcgcagttgagtgtgggccgcctgaagcatggcgtaagtcttgcccacgcccggcgcggcgccgaggaagactttgagccggccacggccgtcccgtggcagttcggctaacagggcatcggcgcggccggagtcgctcatgctttgcggttccttcaggtgttcatttggagtctttcaggccgccatcgcgggcaagcccggctcccacagggaaatgcattccaaaggcgggagcgggcttgcccgcgaagacggcatcactgcttacaacttttccagagccatgttcagtgccagcacgttcaccaccggcgggcccaccagcgggctttcgatgtgctcatccagcaaacgttgcagtgtagccaccggcacattccgcgccgccgctacccgcgccagttgataggcaatcgcctgtggtggcaagtgtggatcaagcccgctgccggaggtagtcagcgaagccagcggcaccgggccctggccggggaccagctgtttgttggcatcgtcaaagatgcgtgtggccagggccgggttgctggggcccaggttgctggcgctgctggaaaccgtggcaaaggcaccggccgatggccgtgggtggaaccagctgtcaccggtgaaatcctgggcgatcaggctggagccgcgcaccttgccgctggcgtcacgtaccaggctgccattggcctggtccgggaaggcgacttgcgccacgccggtcacgaccagcgggtaggcgacgccggtgatcagggtcatcagaaccagcaggctcagggccgggcggatcatgttggacatttcaatttcctcaattcggtcattgcaacctgcgggcacctgcctggcacccgcaggaatcgggtcaaaccaggtgcagcgcagtcagcagcatgtcgatggccttgatgcccacgaacggcaccagaatcccgcccagcccgtagatcagcaggttgcgacgcagcaacgccgccgcactcgccgcctgcacgcgcacaccgcgcaacgccaggggaatcagcaccacgatgatcagcgcgttgaatacgatggccgaaagaatcgcactctgcgggctctgcaggtgcatcacgttgagcacacccagttgcgggtaaatcgaggcaaacagcgcgggcaggatcgcgaagtacttggccacgtcgttggcgatcgaaaaggtggtcagcgcgccacgggtcaccaacagctctttaccaatctgcaccacgtccagcagcttggtcgggtcgctgtcgaggtcgaccatgttcgccgcttcacgggcggcttgggtgccatcgttcatcgccatgccgacatcggcctgggccagtgccggcgcgtcgttggcgccgtcgccgcacatcgcaaccaggcggccgtcgttttgctcgtggcgaatgcgcgcgagttttttctccggagtcgcttccgccagcacatcatccacgcccgcttcggcagcaatggcagcggcggtcagcgggttgtcgcccgtcaccatcacggtgcggatccccagtttgcgcagttcggcgaaacgctcgcggataccgggtttgaccacgtccttgaggtggatcgcaccgagcaacttgccatcggcacacaccagcaagggggtgccgccgctttgagcgatcttgtcgatttcacgggacagcgccggttgcaggtcacggcgctgttgaccgatgaaggccagcagcgaatccacggcgcctttacggaacacgcggccctggtaatcaacaccggacagacgggtttcggcactgaacggcacggaggtcagttgatccagcgtcggctcggcctgagggtgcaaggcgcgcaggtattcaacgatggatttgccttctgccgtgtcgtccgcaagggacgccagcagcgcgccttcggccaggtcacgaccgctgatacccggcgctgcaatcaccgccgcgcagcgacggttaccaaaggtgatggtgccggtcttgtcgagcagcagcacatgcacgtcgcccgctgcttccaccgcgcgaccggatttggcgatcacgttgagccgcaccaggcggtccatgccggcgatgccgatggccgacaacaagccgccgatggtggtaggaatcaaggtcaccagcagtgcgaccaggaacaccagcggcaagctgccattggcgaagtgggcgaacggttgcagggtgaccaccaccagcagaaagatcagggtcaggccgatcagcaggatatccagcgcgacttcgttgggggttttctggcgtttggcgccttccaccaacgcgatcatgcggtccagtgtggattcgccggggttgacggtgatgcggatcagcagccagtccgagaccaggcgggtgttgccggtgacggccgaacggtcgcctccggactcgcggatcaccggtgcggattcgccggtgatcgccgcttcgttgaccgccgcgatgccttcgatgacctcgccgtcaccggggatcatttccccggcggcgacgcgtaccacatcgcctttgcgcaggctggtggccggcacgaccttgaaggtgccgtcggcttccttgcggcgtgcgctgaggccttcgctgccggccttgaggctgtcggcgcgggccttgccgcggccttcagccagggcttcggcaaagttggcgaacaacacggtgaaccacagccacaccgcgatttgcacggcaacatacgtcggcacggccgtgtcgggcacaaagcacaacacggtggtgaggatggcggtcagttcgaccaccagcatcaccggcgagcgttgcagctggcgtgggtccagcttgacgaacgcctggaccagcgccgggcgccacaaggcggagatggcggttttggcaggctcctgggtggttacaggggcggcattttttgcaggcatattcattttcatatccccttagaagcccatgctcaaatgttcagcgattgggcccagtgccagcgttggcaggaaggtcaggccgcccaccagcaaaatggtcacggtcaacagggtcacgaacagcgggccatgggtcgggaagctgttctggccgatcggtgcggttttcttcatcgccaggctgccggccagggccagaaccgggaggatgtagccgaagcggccgatcaacatgcccaggcccagcatcaggttgtggaacgcggtgttggcactgaaaccgccaaacgccgagccgttgttggcactggccgaggtgtaggcgtagagcaactggctgaagccatgggggccggggttactgatcgcaccagccgggccaggcaggctggctgcgatggcgccgagcaccagcacgccaaccggcatcaccaacagggtcaccacgagcaattgcacctccttggcctggagtttcttgcccaggtattccggagtgcggccgatcatcagccccgcgaggaacaccgcgatcaacacgttgagcaacatgccgtacataccggcgccgacgccgccgaagatcacttcgccgaccatcatgttgaccagcgccaccatgccgctcagcgggttgaggctgtcctgcatgccgttgaccgagccgttggacgccgccgtagtggtcaccgaccacaacacagtgccggtggtgccaaagcgcgcttccttgccttccagtggcgcggtttgctcgacggccgggttgttcagcgtcgggttgggctggtattcggcccacaacgaagtcgcgccgccgatcaggaacaaagccagcatgcaacccaggatggcgcggctctgacgcaggtctttcacgtagtggccgaaggtgaacaccaacgcgaccgggatcaggatgatcgccgccagctcgaacaggttggcccacgcggtcgggtcttcaaacggatgcgccgagttgacgccgaagaagccaccgccgttggtgcccagttgcttgatcgcaatctggctggccgccgggcccagcgggatcacttgatccacgccctgcagggtcaccgcgtcaacatagtgcgcgaaggtttgcggcacgccctgccacacgaggaacaacgccagcaccaggcacaacggcagcaggccgtagagggtggcgcgggtcatgtcgacccagaagttgcccagggtcttggtggatttgcgaccaatcccacggcacaaagcgaccagaactgcgaggccggtggcggcactgacaaagttctgcacggtcaggccgaccatctggctgaggtagctcagggaggcttcaccgctgtaggactgccagttggtgttggtcatgaagctgaccgcggtgttgaaggccagcgtccattcctgacccggcaatttctgcgggttcagtgggagataatcctgaaacagcaggatcgcgaacaacagcacaaaacctgcaaggttgaacgccagcaacgccagcgtgtatttctgccagctttgttcctgatgctcgtccacgcccgacaggcgataacacgcgcgctccacggggccgaataccggcgtgagccaggtacgctggccttccatcacgttgtagtagaaccgccccagggccggggccgggatcagcaccaaggcaaagaaggcaatgatcagccaatagtcataactgtgcatggccagctcctagttccgatccgcgcgtaacagcgcaaccagcagataaatgaacagcgccacggccaatagcagtgacaccccgtccagaacgctcatggaagtctctccgaattgcggcgattgccgcgtgcagggcaattgtcggcaggagtggcgtaaaggaacgagagcgagggtatgggcggggcgtaaagacggcgtaaagagtgggtttatgcggggtttacagggggatttgtgcaggttcggcgggcctcatcgcgggcaagcccggctcccacactggaccgtgtttcagcaaggcatgcgcggtccactgtgggagcgggcttgcccgcgaaggcgccagctcagtcaccacagcacttatctggtgcaaagcaggcaaaattcaaacgcaaaaccgtcgcactggcgacagttacgccgctttacgacaatgattctcaggctggcatggccactgcaacaccctgaatcattccaaccggttcagggagagcagcacaatgaacacacaactcaaacccaccttgggcaccttgcacctgtggggcattgccgtcgggctggtgatttccggcgagtactttggctggagctatggctggggcgttgccggtaccttgggcttcctggtcacctcgctgatggtcgcggcgatgtacacctgctttatcttcagtttcaccgagctgactaccgcaattccccatgcgggcgggccatttgcctacagccgacgcgccttcggagagaaaggcggcttggtcgccggcctggcgacattgatcgaatttgtcttcgccccgccagcgattgccctggcaatcggcgcctatctgaatgtgcagtttccggcactggaccccaagcacgctgccgtcggcgcctacatcgtgtttatgggccttaacatcctcggcgtaaaactggcggccacctttgaactggtggtgtgcgtgctcgccgtcgccgagttgctggtgttcatgggcgtggtcgcccccgccttcagcttcagcaactttgctcttaatggctgggccggctccgacacctttggcgcaccggcgattgccgggatgtttgccgcgattccgtttgccatctggttcttcctcgccatcgaaggcgcagccatggcggccgaggaagcgaaagaccccaagcgcaccattccaaaagcctacatcagcggcatcctcacccttgtgttcctggccatgggcgtgatgttcttcgccggtggcgtgggcgactggcgcaccctgtcgaacatcaacgacccgctgccacaggccatgaaaaccgtggtgggcgacagctccggctggctgcacatgctggtgtggatcggcctgtttggcctggtagccagcttccacggcattatccttggctattcgcgccagttcttcgccctggcacgcgctggttacttgccgcctttcctcgccaaactgtcgcgctttcagacacctcaccgggcaatcatcgccggtggcgtggtcggcattgccgcgatctacagcgacggcttgatcaacctgggcggcatgacgctgaccgccgcgatgatcaccatggcggtgttcggtgccatcgtcatgtacatcatgagcatgctcagcctgttcaaactgcgcaaaaccgaaccgctgctggaacggaccttccgcgcgccgggctacccgatcgtgccgggtatcgcgttggtgttggctgtggtatgcctggtggccatggcctggttcaacgcactgatcgggctgatcttcctgggcttcatggtggcgggctttatctacttccagttgaccgcgcaagaccgtgccgacgcgccagcggatgcgatgttgaccgggctctgaggttaacgaggcggaacaggcctacactgaactactcagaaagcctgtgactcaaagctgttattaccgtgggaaaactctcccccggtagtccgcctcaaggagagccttatgccgtggtatgcgtggttgattttagtggtagcgatcgggtcgatcgtcggtgggctgctgatgctgcgtgacagcgccaacaaggtggaactcaccgacgaacaacgtaaacgcgtggccgagcgcaacgcccaggcagacgccaaggatgcgcaagaccgctaggccgatttactcccaagccgccttggcgatatgcaaaccgtgctgccctttataggcggcacgttccggctggctccagccgttcagtagctcattctccagcttgtagatctcgacgcccagtggacggcacaccgtcaacgggtcctgcgcgtccggcccccacatcggcagcgacagatcgccccccgggcaggtcgacaacgcacacagcagatcaatctcggcaaagaactccaggtaatcgcccttctgcgccgggcaggctttcatgaaatacatgtcgtcatgattgaggccggtgcactggaaaatgttcagcacgtcatgcacatcgaattcggtcaggccgtgaggcagtacggcgcgggtcaggttcgagtggcaatgatggtggaagtcttccccggtcagcatgcggttcacgtaagggtcgcatcgagtaccgagcaaatcgtgcaggcgaccaccgtgttcatcgatgccgtagctggccaggctgtcatccgtaatggttaccagaggacgcaaaaacggcaggttcgaccacagacggtcatgggtgctgacatgggcaccctgcaactggcgcgttctcgcagcccacaggcgttcgcgtgggtcgttggcgttccatacgttgaagtcacccacctgcggacccacaggcgtggtgacgcgaaatacatgcccggccggcaccttccacgccctgcccgtgcggatcggcacctcgaactgctcgatcagcgtgcgctggtccggccggtcacgaatgcgctcgtagaacgccttgtccacctgcagcgctgagcctttgctgacctgataagcggccgggtaatctttgtacatgggcaatcctccatcaagggtgatcaaacagggcaagggaaaggcgttccgaatcgtcgaggtaggagctcatcgcctcctcggccgccgatttgtttgcctgggccagtaactggtaaatctcaaggtcgcgctccagccatggcgattggaaacgctgttcatcaggagcggcacagaacaccagccgcagttgggctatcacttgggcaaaaaactcatcaaataacgggctgcgcatcaacccgacaatccgctgatgaaagaccaggctgtgggtggcgactgctcgccagtcctcacgctcccgcgccaggcctgtcgcctcgatggcgttttgcatgcgctcggcttgatcctgcgtcagcgcgtggctctgtgagattgcccgcagctccagggtccggcgtacgacgaacaggtcgcgcacctcttcacgctccaatcgacggaccatcacgcctttattgcgcacatagcgtgtcagcccctcctgccccaggcgatgcaaggcctctcggatagtgttgcgcgaggcgttataggctttcaccaggtccgcctcgaccaatgccatgcccggcagcaaacgcccgccgatgatgtcggcacgcaactccaatgcgatctggtcagccagggacaaactgagtgtcatcatcactccacgattgttgaacaatatctgaaccaaacgtaatcacgtttcatgccaacgcagacgggcacttttctgagtgggtaaacccctcaatttagttaacatgttcgctcgtacccgaggcagtcctatgcgttactcacaagaccataaagcccagacccaccagcgcatcatcaacgaagcggcagtccgctttcgtcgagatggcattggtgccactggcctgcagccgttgatgaaagcattgaacttgacgcatggcgggttctacgcacatttcaaatccaaggatgagctggtggagaaggctctcggggctgccgccgcggaactggatcagcattgcgcaatgctcttcagccaggagcgccctctggaagcatttattgacagttatctgtccgagtggcacctgacctctccggatcaaggctgccctttgcccacaatgtcgtccgaattggggcagagaggccagcatagtccgactacggatgcggtgctgacggctcggttggagcagatcgaagcagccctggaaggtgagaatgccgacgaacaaagcctggtattgatgtcaacgctggtgggcgctttggtgctggcaagaagcgtagagaatccgcagttggcgacgcgcatcatggatgtggtgcgcgtcagtttgaaggctcaggcctcagagaatggaaaggtcgatcaatgatcgcaaccggctaatcgagcctgaggcggaatttcgacagcggtaataggcttcgaagatcatcatcggccacgcagcacgttagcttcagaagcccctgcccgcagaccactacaggcaggccctcctcaatgaagatcaccttgcccggcgtgcggttctcgattgtcacgtcatccagttcctgggccgcaagtatgcgcgcaggcactttgtccaacaggcaaaacgcgcccttataaggtgccccgacggcatcgatgatgtggcgtatcttgctggcaggcaggctccaatcaattcgatagtcctcatcatcacgccacaggctgtaagtcgcctggtcatggtcctgaggccgagcgctcaacgtttcacccgaggccaaggtctgcatgatcgatttacccaacgccacataacattcattgatcgccgatatggcctcggcaatggtgatggggtaactgatctgcagggccgattggtcaatgatatcgccgcgatcatattcagcagcgccgaagatggcggtcacgccgatagtgcgctcatggttgatcaatgcattgaccaatggcgcaaaacctcggtacctgggcagcaaggaatcatgaaaaacaatcaacttttcagcaggatgatcgatcagccaccgccaggaaatggccattgcatactcggtgtcgatcctggaaaaatccgaacgaaagctgaaccgtacattttgagaatcgcaaacggcagcgatctcactggagtaatcgttctggacagcagcgtcctggccgatgacaacttcagcgataaaatccttgtagagcggaacaacctgctcaacgaaagtaagtcctttttgggtcatgacaaacagtgtgaccgaattcgatgtgctcacgtttccctcttctgtgcaaagtcttctcctcgtcgcaatgtcagcgcacagcgcgaggtatattggccgggatgtttatccggcctctatgtgagtcatttccaggcacatatcgttcaacttatcgaggtaaaacgtgacgaattcgcacatggttttgcgaagccctcaccaaatattcgccatgacgtcatgctgattactcccggaatcacccaacgcacaatgccaaaagcccgctccccgagcagcagcaggccgttcaaaccgagacctggcgaatgccttccggccttgggtgctgggttgttcgggcacgtaaatcgcaggcaataaaaaaggccggtcaatgaccagcctcttggatttcattcacattatcagttcagttcgagcctatcgcggttcttttcaagaagcgctttgccaatccccttcacttccagcagttcatcaaccgccgtgaatgaaccattgctttcacggtaggcgataatggccttcgctttggctgcaccgatcccaaacaggtcacgccgcaacgtttcggcatctgccgagttgagcttgaccctgttggtttgctcggcgctggtcatctgtacgctggtgggcgtcgatgcttcacttttgcttgaaggcgcagcatgggttgcaagggaaatactggccagaatggcaaagaccaaggacgagaaacacgctgtacgcataagtaaaactccatgacatctctaaaggaaaagcagcttttccgaagctgcctttcaaacttaggcgatcttgtgagagagtcaaaaatggctacgttacagcgtgtaagctcagggctcgaggcgtcgttgctgatagatccagtcaacgatttcaccgtccggggcatagccgctgacagtttcgcgcaacatctgcctgacccgtgtgtaatcatcctgggccacagcggagatcagctcggccaatttcgctttgagcacctcccatggcagatgatcttcgttggcactcatgatcatcgggtgttgagtggcaaccacgttgtcaccaatcagcaactcttcgtaaagtttttcacccgggcgcaaaccggaaaactcaatggagatgtcaccatgagggttcttgtcagagcgcacgctcaagccagacaagtgaatcattttctctgccaattcgacgatctttaccggctcacccatgtccagtacgaagacatcaccgcccaggcccatggagcctgcctgaatgaccaactgagcagcttcgggaatggtcatgaagtaacgggtaatcttcggatgcgtgaccgtcaacggcccacccgacttgatctgtttgtggaacagcgggattacagaaccggatgaccccaggacgttgccgaaacggaccattgtgaagcgggtcttgttgacacgcgacacgttggatttatcgttgaaaagtacaggggcaagttcccggctgagcgcttgcaacgtcaattccgccaagcgcttggtactgcccatgacattggtggggcgaacagccttgtcggtggaaatcaatacgaagttggctacaccagcctgcaaagctgcttgcgcagtattgagcgtgccaatgacgttgttcaatacgccctcggcaatattgtgctcaaccatcggtacgtgcttgtaggcggcagcatgatagacagtgtcgacatgccaagtcttcatcacatccagcaacttgttctcgtcacgaacagaaccgaggatgggcaggattttgacgggaaacgattcacgggtaacacgctgctccagttcggagagaatgctgtagaggttgaactcgctatgttcgaacaacaacagtgtcgtcgggcgcagcgacaatatctggcggcaaagctcggagccgattgaccctcccgcgccggttaccaggacactctgccccttgatgcaatgttcgagtaactcttcattggcaggcaccgcgtcgcgccccaacagatcggcaatgtcgacttcctggatatcatcaaccttgacgcgcccgctggccaggtccatgaaacccgggacacttcgtacatgcagcggaaacccttcgaggaaacccagaatttctcgacgacgtccgcgattggaagaaggaatggccagcaggatttcctgggcaccggttgcatcgatcatgcgctggatgtgcttgggcttatagacctgcaaaccggaaatgacacgatcggagatgctcgcatcgtcatcgataaaagcaacagggcgcattacccgccccatacgcaaagcagcgaccaattggttgcctgcggcacccgcgccataaatagcgactctcggcaggccgtcttcacggctggtgaaaggcacgtgctgagaagcggcaaaccaatcacccaggaaatactgacgcatggctaaccgcagcccgcccaccatgatcaggctgagccaccaatagttgaagatgatcgagcgaggaacaacgtgctggtggttactgtaccaataaaccagaacgccaataatcagcgaagacaggctgaccgctttaatgatcgcgatgagtgcgtcattgccaaagtagcgcatcaccgccctgtacatgccaaagcgaacaaacaacggtatggtcaccacgggagcacaaatgaacagccataagtgcatctcgaccgggttgatcatatcgtcaatgcccaagcgaactacaaaggcgagccacaacgcagtccaaaccagaatgacgtccgtgaatacttgcaaaatccgcttttgcctgcgtgacaggcttaataaatatgcacgaattgtgtccatgaagtacccgcctcctccaaatttctgaatcataaaaaaccgaaggctactgagtacaaagcctggtcggaaagccctctggagggccgaatttcagcgctgggaaccgtcaaagtcaaaagctcgcgcctgcacccacatgatgtgtgagtgcaggctcgggttttgattcccatcaacgcgccaggactttaaaaagcgtggcaaagatgatgcggatatccaccagcaggccatgatcgtccacgtactgcagatagtaggcctgcttgatcggcaaaatcacttcgatataagcctttcgaggatcagcatatttagccagaatctcattttcatccaccatttcgatggatgcacggtcggtaatccccggacgaaccgacaataccttttcacgaacagccgggtcataacaatcaatgaactcctgcacttccgggcgaggtcctaccaggctcattttgccgagcaatacatctatcagttgaggaagctcatcgatcttgaagcgcctgagaaaatcaccggaacgagtcacacgggcatccttgccaacggtcagccgccccccacgctcagagtcagtgctcatcgtgcgaaacttgtgaattctgaatggaacgccaaagcgccccaccctcacctgcctgaaaaaggcaggtcccggcgaatccagtttgatccataaaacaaccaacagaaaaaacgggctgagcaccagcaatcccaaaaatgccgcaaagacatcgaaccctcttttaagcattgctcaataccgtcttgatggtctcgatcacacgcaagagatcggcctcagtcatcttggtataaagcggtatggtgacctcttgttcaaacagtttctgcgccaccgggaacatttcggcggtgacattgcagctttcgcgccagtaagggtgcaaatgcaacggaatgaaatggacagagcaaccaatgccggccgccgccattttttcgatgaacacgtctctgcttacacccgcttcaggcagcaagcggattgggtaaagatgacgggcatgcagatcaccctctggcggattttgtggcaacaccaggggcaggtccttcagcgccagattataaacctgcgccatcgcctcgcgtcttacctgaaagtcgggcaatcgacgtaactgatggatgcccatcgccgctgcgatgtcactcatgttgtatttgaagcccggagcaacaatctcgtacgaccacgcaggcgttttggaaacataacgatcaaacgcgtctttgctgatgccatgcaagcgcatgattttgcaacgcttggccaaatcaacgtcacgagtaacaaccatgccaccttcgccagtggtcatcgtcttattggcgtagaaactgaaaaccgtaaaatcggaactcagtgcgccaattttctgcccgcgccacgttgtcggcaatgcatgcgcggcatcctcaaccacacgcaggccatattctttggcgatcgacagaattgcatccatatcgcaactcaggccggcaaagtgaacaggcatgatggctttagtgcgaggggtgattgccgcgacaatagcagcggggtcgatattataagtttcttccagcacatctacaaaaatcggggtaccgcccaggtaacgcaccacttctgcggtggcagtaaacgtataagtcggcaaaatcacttcgtcgccaggaccgataccgatagcttccagggcaagatggagcccggccgtcgctgaattgacggcaatgctttccaggccgccccccaggaactgtgaaaagtcttgctcgaactggcgtgccttgggacccgtggttacccaacccgaacgaatcgcatcaaccacttcattgatttcttcctccccgatttcaggaagagcgaaaggcaaaaaatctaggctagccatattacactccgagctttttgatataacgattcatgaatctgtttccactcttggacagcaccgcatccagggcatagccgttcttgaggtaaaacgtattgacggcttcgtttccgtcgcgatcagttgtcaggtaaataaaatcaaattttgattgattcgcaaattgctccacaccctccagaagcttacgccccacacccaggccttgagcctccggagacacggaaatagtgctcagcaatacagcattgctggtgtcaacttcctcacttgcgtcgcctttataaaaaagagcagatgccagctttcttacgacaatgcccgggtttctgagcaaactgggaatggcgcagaaaaaaaacttgattccctgcgtccgcaacaagcctttgtaaaaagttgaagggttagcaatagcgaccgcgacgccgacaggatgagcgttcaaaccttcggcatgtcgtgcaatcagacagatacacgaagaagaggaaagatagtttttatacagcacgcttaaaaagcgcgggcccagcgaggttagaaaaaaacccggaaacgcggcgatgtgcaagttcaccaagtagcgaactgattcagcatcggcgctagttgcacgctggatattcatgccaccccctcaaaaatggtattaattttcgctaatgccagatccgaagagtaaaaattttcagcataagcacggccagacctgcccatggccagacgttcctcgggggacagacttataaaaccatccaggcacgaagaaatggccttaccactgcgctcttcaacgcaaaaaccggcacccgacttttgcagctcgattgccgactcactgcgactgttggtcagcagtagaatgggacgcgcggaaagcagataggttatcagcttggagggaaccgaagcaaactcctggccggcagcgataggaagcagcagcaaatcagcgcacccgaaggcgatggatgtcaactcggagggccaaggcaccagaaactttacgcgggattccaggcctttttcctgcaccatttcacgcaagccaggaacaagagaaccatcacccgccagcaggaaaattattttgctgtcgacactctcaacatggctcattaactcatcaagccccgacgctactcccatattgccaccgtagacgcagacaacatcatcttcagccaagacaatagaagtctgtgccgccaactgagctcgggccaacgccttatccataacggtgacttgattactcttcacccaattacggatcacggtgattttatcttcgctgatcccacgcccttgtgtataggacgttttgaacccgtcagatataacaataatgcgatcacagtgccgggcaacaaacgagtccagaaaaaacaataccctataaataacacctgaatcgctcaggcgcttttgtgcagccagagactctgggtacaagtcttgaacactggctacgacttttataccttttatcttgcacgccaacaccaataaaccgagcgaaaacaccggccagacgttggcgtacacgacatcaacttttcgttgtttcaacaagaacagtagtaccgaaaccccataggaaatattttcgacaaatcgcgatataaatcccgactttccggaagagatagcgaatagccgcttgaccaggaaaggcagtgtcatggatgcgaccttcgcgtccgcatccgcctttgatacattgcggctaggcgtggggcatgccacgataacttcatggcccaactcatgaaaatactgagcgacgtccatgctggtttttgcactcaccaccggttcaggcggaaacacgcaacttgcgataatgactttcacgttatctaccttaattagcttcggccgtatcgatcttcaaaacgcacgatatcgtcctcacccagatatgaaccggattgaacttcaatcaactccagcggcaccttacccgggttttccaaagcatgaacctgaccaataggtatgtacgttgattggttttccgttaccaggtagctctctttgccgtttgtcaccttcgccgttccgctgacgacaatccagtgctcagcgcggtggtggtgcatttgcacagagagtttggcacccggccttacggtaatccgcttgacctggtaacgagtcccttggtcaattgaatcgtagctgccccaaggtcggtagacttcacgatggacaacgaattcagggcgatcctgtgccttcaacttctcgacaataagcttcacatcttgcacacgatctttatgcgcgaccagaaccgagtctttcgtttcgacgataatcagattgtctacaccgaccgcagtcaccagacggctttcagcatgcaaataggtatcacgcgtgtcgtgggtcaatacatcgcccttcatgatattacgcgactcgtccttggcgcccacctcccaaagtgccgaccaggaccctatgtcgctccaaccagcccccattggaacgaccaccgaattttctgttttttccatgaccgcataatcgacagacaaatcagggcaggttgcaaagattttggggtcgacgcgagtaaagtgcagatcctgcgcgcctttctggagcgcctcctgacagatcgaaaaaatatcaggctgaaacagttgcaactctttaaggaacgtacttgcgcgaaacataaacatcccgctgttccaggagaaacaaccttgtgcgacgtagctttcagccactgccgcactgggcttctcgacaaactgttttaccttgtagccgccgccgtcgaggggctcgcctcgctcaatgtaaccataacccgtctcaggtgaagttggatcaataccaaacaccacaagctttccggattcagcgaaaggcagggcagtcaaaacactttgatggaacgctgaaacgtcctggatatggtgatcggctgccagcaccaacaaaaccggatcttcaccgtcctgaaccgcgcgcaacgcggcaagagcgatagccggtgcagtactgcgcccttccggttccaagaggatattggcattttccagaccaatctggcgcagttgctcggctgccagaaaccgatgctgctcgttacagatcagttgaggttcggcggtcacgagcccggataaacgtcgaatagtgacctgtagcatggaaagatcatcgataagcggtaaaaactgcttaggatgctgctgacgagagattggccacagcctggaaccgaaaccaccggccataattacaggaacgatcataaaacacccaagacagaagtatacggattcacgaatccaaggataaccagtacatagacaagctgaaacaatgccacgctgagtatcaatgccccgcccacaagcctaccaaagagaacgatatacgaaagcagggaaaatatcataaacccattgaatatatcggaaatcctgtaagcgaaaacttgtaaatcatgcagcgacaacaaaatgatcaacccacacaaatgaacgatcaccgcgtaggaaacgaaacttgactgctttttgatacgatcaaaaaataatattggcggtgtaagcaatataaaatgaaacaggacacggacaagattaatgcctcctccctcacccgccaacgcgttttctatgtagaaactcaaccgctcaatggacatgctggacgcaacactcaacagcccctgggtcatactgatattcagcataaacaacaataaaaacacacaacacagcaggtaaagcgcccaggcacagcgagcgctattaaagtaaaacagcaaatagaatggcaagaaaaaaacggtggaataatgaaaacaaactgcgcacacgaataacaacgccgcgctcaagcgcctgccttcataaaaacggaacgcggagagcaagataaaactcatcgccaccccgattctgatttgtgtaaagtcctgcaggaagaaaaaataagatatataaatagcagcactaaaccaataatagctactcacccgctttgacaaataaagctttatcgccacccccagaattgcatacaccaaaaacatgaaaataccccctcctgtcaaaaacagggagagcttggacaaaatataaaagctaggttctataaaaaagacgcccagcgttccgtcagaaacgcccgtcacatagttaacataattcagatgatcttctgatacaccaggtgcttgcaacgcacacatcgcaaccagcaaacacgtcaaaaaaaagtaagctatgcgacccggccgccctaaggccgaatataaaaaagatacaacaaagggaaaaaaatataaaaacattaatcaaaaccctattaacagcccctaaaaaacacgaatacctcttagactaaatccacagactgccaaggtccaagatctcaaggcgggcctgatgtcagcgcccaccccaagcgtgcagagttaacctctaacagaacttgcgttcttcacaaaccactgataagcatcctcgagcccctcattcaacgagatagaagctttccaccccatcccctgcaggcgcgaaacatccatcagcttgcggggcgtaccgtctggtttcgatgtatcaaaaacaagtttgcctttgaagttcgtcaccacggccattgcctcagccaactcgcgaatactgcaatcgacgccagtaccgacgtttatatgcgacagcatcggttgaacatgggcggtgtaagcatcagctggaagattcatgacgtagacagaggcagccgccatgtcatcaacgtgcatgaattctcgcatcggtttgccgctaccccagatgacaatttcttccttgcctgactcaacagcctcatgaaaccgccggatcagcgcggggatcacatggctgttatccggatgataattgtcgtgtgggccatacaggttcgttggcattacactacggtagtctgtttggaactgccgattataactttcacacaacttgataccggcgattttcgcaatcgcgtagggctcgttggtttcttccagcgttcccgtcagcagcgcgctttcactcatgggttgagtcgcatgtttgggataaatgcaagaagaccccaaaaacaataattgctgcacaccatttttataggctgcatgaattacattggcttcaattaccaggttttcataaatgaagtcagctgggtagacattattcgcatgaataccgccaacctttgccgctgccaaatacacttggtcgatgttgttttcgctgaaaaagcgtgctacctgcgcctgactaagcaggtccagctctttcctgcttcttgtcagcacattcgtataaccaagtgcattcaagcgacgaacgatcgcggaaccaaccatgccctgatggccggcgacaaagatggtcttatccagatcaacactcattttaacgctccagggacacatgcacgtcatgcccgtgagacatcagcaaggcgtgacggcgagcggccttcaagtcttcggaaaccatctccgcgcacatttcctgcacagtaatttcaggtacccaacccaatacttccttcgccttgctaggatcgcctaacagcgtttccacttctgcaggcctgaagtaacgtgggtcgacctgaacgataacatcaccggctttgagagcaggagccttgtcaccttcaactttttcaacgatagccttttcttcgacgccttcgccttcaaaccgcaaagtcacacccaactcatttgcagaccagatgacgaactggcggaccgaatattgcacgccggtggcaatgacaaaatcctcaggcttgtcctgctgcaacatcatccattgcatccgaacatagtccttggcatgcccccagtcgcgcagagcgtccatgttacccaagtagaggcacttctcaatgccttggccaatattcgccaatgcacgagtaattttgcgggtaacaaatgtttcaccacgacgaggtgactcgtgattgaacaaaataccgttgcacgcgtaaataccatacgcttcacggtagttaacggtaatccagtacgcgtacattttcgccacggcatagggcgagcgaggatagaaaggagtcgtttctttttgaggaatttcttgtaccaggccgtacaactcagaggtagacgcctgataaaaacgggtcttcttttccaagccaagaatccgaatcgcttccagaagacgcaacgttcccattgcatcgacatcagcagtgtattctggagactcaaaactgaccgcaacatgagactgagcgcccaagttgtaaacttcgtccggctgaacctcttgaagaatacgcgtcaagttcgaagaatcagtcaagtcaccatagtgaagaacgaaattcttgttctcaacatgcgggtcctgatagatatgatcgacacgctgcgtattgaacgaagatgcacggcgtttgataccatgaacttcataacctttctcgagcaaaaactcagccaagtacgaaccgtcttgacccgtaactccagttatgagggctttctttttcattccaactcctttaaatattcttagagcgcaaccagaccggaaaccttatctttccagcttttaatactaaatatctcagacacctgctgatgtatttcaagcggcgtgtcaaatgattcgatgccagatgaatacaaagaaaatactttttcggctaccgacttagcatcaagccgtgccgtcaggtagccatttttaccctcgcggatcaactcacgcgccatgccaacgtcaaaagacacaaccggtgtaccacacataagcgcctcagcgagcatcatcggccccgcatcttcgattgaggtgtttacaaagacatcaacagacctgtaaaggtccgacaattgctcatcacctcgccggaaaccaaactcctcaaacacgatatttttgaattcaatgccactgaaaaaatcagatttcagacacaaaatacaaatcttatcgtcgcccgacagctttcggtccagatgaatcaacacttccaacaaataattaaaaccctttcgcgggtcatcaacatcgttggcatttgtcagaattttaaaaagcccgacccgtggcgttacagcaggtgtgtagaactgctcattaatgggaatgggcaacctgatatattcgctgtacggaatcgcagaagctttcgcttcttcagtgatgcgctcactgcagcacaagatagatgcattcatcgctgcaacattgatcgacttggcacgcaattgatgcgctgcataactgcggatgccgaagtcgagcgcaggacaatccgaacagtcagacacaaaccccctgcagttccaataatagtggcaaccacctgtcaaatgggccatgtccatcgtgataaagtagactttgcagcctgtctttttgtgaatttcaagcacatcacgtgtattcgcgaatcccgctacccagtgcacaaacaaaaagtcagcttgttgaatctctgagacaagcttggggctcagcccttggaccgccgattccccgcgagtaaaaaacaaatacttcttaccgcctgaaaactttgatctggcagaaacaaaattccgtattttcgagaatatttttggcggcaggagacgtcgtaacgaagccttcacccgaagagcattattgtcgataggcaacatttttgtcgtgctatcaacagattgtcttttggactctgcgatatagagctcagaattgtagcccaacgaaagaaaggcttcgtgatagcgcaatgcggcgctaccggctccaccaaaatcattggtagaaagatgcactatttttgggactttcatgttttatccattaatgattcttcagccgcagtacgctccctgctgcctcgcctgcgcaaatagagcattgcgctgactgcactgacgacgaagtaaaggatgtacgtcagcatgtaagcttgcatcacactctcaacaccttgaaccttcgaactcaagagcgttgcgataccaaaaaacacaccaccctgaataatttctgcggcaatatagagtttggtggcagccttggcgacggcgataaaaccaaagacataggaactgattttaaagaagtcacctatcagttgataggcgatcaaatccttcaggcccgaaaactctgcggagaacaatagtgtgataaaaaatccacgcccaagatacaacgtaagcgcaccaagaaaaaaagcagcctgcacaaacaacaagcacttaataaccagggctgacagcctgctattttcggtcaacaaagaagctttcggcataaaataaaagctaagaaaaacagtaaaaaaccctaaataagcagccgaaagccggattgaggcctgccagatacccgcgtcatgaaaccctacttgcgtgatgagcatctgccgaacaaaaatctctacaatcgggaagcataccgtgctgaacaacaacatcacagtataagaaaaaagcttggagaagcttccattcatcgacagtgacagttttacttggcgccagaattttgattttctaaaatagaaaaaagccggtattgcacatagcgatgatgcaaacaccatcgaaagagcagctcccggcaccgcaaagtaatagatgacagcccaaaacagcggaattgaaagcaggctgccaaacagttggctgaacgcaaataccttggtatctgtcaaaccatttgaaacgccaaaaacaatattcgcaaatgcaaaaaacaactgcattaccgccaaaatacaaataacaggatacatgtcgccgttattgaaaatcagttttgctatgggaacggaaaatatgattcccgctaccattaccgccaacgcaaaacacgtcgcataggaggctgacgcagacacaaaacggaacaggacaatcggcctgctcctgtactcggatgtatacttcacaacaccgttgatgatcccccccccggataacacggtgagaatactgaccacgctcatcatgtgcccaagctggccgataccatcagggccgaggtaaaccgccatgattttaagcagcgcaaatccggccagtatcttcgcaccatgcgccagggaagtaagagccagcgacgataccatgctcatcgcagattactcattacctcaacgacggcgtctataacagtttgattttcttcttctgtcatattgaaatacaggggaagacggaccaatcgctcactttcagtcgttgtaaatttatcctcgccggcaaaacgaccaaatacttctccggccgggctcgaatgcagaggaatataatggaacggtgccaaaatccccttctgacctaacgcactgataaactgcgaacgaacagaaatatctttgagcttcagataatacatatgtgcattgtggcttgccgatgccggcacaaaaggtcgtacgagtagacctttctgttctaactcagcaaacgcctgatgatagttgttccaaatctgcattctgcgctcgttgatgctattagcgctttcaagctgtgcatacaagtaagcagcctgaagctcacctggaagaaagctagaccccaggtctcgccaggtatatttatcaacttgcccgcgaaaaaactgtgaccggttagtacctttctcacgtattacttcagcacgaagaataaactgttcatcgttgattaacagtaatccgccttccccaccactggtgtaatttttggtctcgtgaaaactataagctgccatatgcccaatggtgcccagtggcttacctttgtaagtggacatcatgccttgcgcggcatcttctatcacaaacaggccatatttttctgccagcgccataagggtgtccatctcacatgcaatacctgcatagtggactggaacaatagccctggttttttcagttatcgccgcttcaacagcagtctcatcaatgttcatggtagcgggatgaacatcaacaaatactatttttgcaccgcgcagcacaaacgcattggctgtactgacaaatgtatagctgggcatgataacttcatcgcctggcttgatatcaatcaataacgcagccatttccagcgcttgggtacacgagggagtgagcagggctttcttgcactcgaatttattctcaaaccaggcctgagactgttgagtaaattcaccgtccccagacatcttgctgcttctcatcgccttgatgacgtatttatcttcttcgccagtgtaaggtggcttgttaaatggaatcactttaacccctgctgctgaataaaccattaaatatagaaaatacagtcatgaaaacataatcatcaagacgtcaaccgtcacgcagacactctattcacgcctcagccaatgatttcaaaaattcatcttcgagtttcaaaaggtctttctttctttctttcacccgcttggcaggcacgccagcgtagatcccccaagcagcagtgcttttggtaagcaagctcatcgcgccgatcgaacaaccaatttctactgtcacgcccggcaaaatagtagtgcccgccccaacgataacgtgcctctccagatgaacagccgcgaacaattcttttttaaactgtttgggaatcaacgagtttgtcagtgtttcaccgctgtaatcatccgactgcgaaaaaatcttaacgccgtacgcgagcgtgcaaaaatcttcgagtactatccctggtgacccacctgccatcaggcacataggggtaatatggttaaaccgccctattttaacgctacctgagataatacaaaaatcgtcaattcgggaataatcacccatttctatctgatcggcgttgtagatacacgccttatcactgatcttcacatgccggcccagcgccttaaaccccaagcgttcaagttctatctgatttaagtacgccattctctacagctccgacatatttttaaaatagtaaacttacttgaacctatggatgccccgtcaaatcaagccacactgcttgggcatccagccttccttcaattttgacacaccccagcgccccagttcttttcatcgcccttctgaagacgctgcttgccttcaccgcccaaacgtgaggcctggtgaaatatccaattcacctcacatccgctgacgacacgcctccccttgcgtgaaaggggtgacatccatcaatagcagggcgtgctctgctccacccatacacacgaaaatcgaatcaaaaaccggaaactcgggctcaatcacctggacagcggtaaatcacactgcaagctctttataacgacacatcggtatctacgcgaccgacggtcttccaccaaatgcttccaccatcgccatcccatacctggaagagagctgcgcccaattcgcgccgttgaaagcaaaccgcggaaaaacctctgacgccagcaaaggcgcctgcagcacacacatccttgccgaacgagattttctactgcgcgctcaccgtgctttggcttgccttacagcagttcccaattgctagctcgcaggcttctgaacgccgtagatttgctcgtttgcgcacactacgcgccagaagggttcttctacgcgctactctggcgacatcggctcacgcaccttttacttcaaaatatgggcacaattttaaaacttgcctgaatgatacagaccccacgctccatttcaagaagaccacgacccacacgcacctttgacaccgtgtgccttacgcaggaaagcagcataacgccattactcagtacgaatgcaccactcaagaaatggggctgggtctctgagggaagaattcagactcgacagccattctcccctcaagaaattgcgcggcgaaccagcatcatattttgagaattttcaaacctcagaaaagaggccttcaaattcgccttcgcaacgtcactatcgcgatgtgctcactctacactttcaacatctaaagacttacgcttcgcaggactggctagcgctggaatacttttatcaactgcacggttgctgtaaaaaatatatttcccaagggcaagcatcaacccagcaagcccaccgagcaataacccaagtacaataatcaacgttcgcttcggctttataggagccaaaggctccagcgcctgtcgatctatggtaactagcttcatattactgatgtctagattacctaaattatgtaaccgtgtgacctcagcccttaatggctcaaccccttgaaggaaaagatcttcattttggcgctgtttcaaaacttcgatctctcgattgcttttcagcaggtcaagctctcgtgcaatttgcgcaatacggccttcagtgaaatcatctgccttacgccgctgaagcgccgagcgctccgcttccagggtttcaacccccataaaatacagaggtatttgctggttatttatttctgtgcgcataacgtttgactcgcccccacggccggcctcgcccaatgccgaaggtgtggttggcttctgtatattgaggcttcttgcaatacttattgcctcagtcaacaacgccactctgtccatgcgaccagttttaagctgcaagcgcagcgctctcaactcgtcctgcaactgcgcacgctttatattatcggcttcttggagcgtcgctatgcgggcttctttaccagtttggtaactcgaacgtgccgcctcaatttttccctcgagctccgccagacgattgttgacgataactttaaggtccgcagcaatattttggcgctccgcatcgacagcgtatttaacaaagctgttaagaatgcgcacaccatctacattgctggaataattaagctcaagaccaataaatgcgctgagcaaatccgcctttttgggatcgggcaataccagtttgagcgcatcacgattgaactcatcaaagctttgctctaacgatcgaccgggacgttcaaattgcttaaataaatcttggttggctcgaaaaaaacccaagcgagtttcgtaagactctagagaagcgcctacttttattaacgcttctccaggggggagcttatagacttcggaacgattcaacgcgtccaattcattgatagctgcagggcgcagaacgctgctgacttgatattctggcgtaaccaaaaaagcataagcagcggcagcaattccaaaacttgcagccgtcactgtaatgagctttttctgtttccaaaaagcctgaagaagagcaacgaggtcaatttcgccgtaagacggtatcgggggggcgcgaaagctactactcacaacaaaaacctgccttcaaagagaaactgcgggctcgttatgcagacaattttatgtattttttattttagttatatgaccgtcaaaacccggcgtctctgccaaattttgagcgcacaaaatgcccgttatcgagaacaaactccattttgccatctctctgacatattacaagtcttgacagagctgtaggacgaatctcacaccaccgaacgccacactcattagcgtattggacaaatcggtaagcgaaaaaaccagaaaaccgagcaaacgcacagcgtcgcgacaagcgcacaaggctgcggccactcaaacgtgcagtgaattttctgacaaccagctttaggtccagcacacaaatgggagggggaaataccgtcgttagccgcgctgagcaggtgacaatttactgcgacggacaccaaacgcaacacccaataacggccctatgagcatcccaagaatcaacgcaagcacaacaaataccgctaccggcatctgcgctgttgcccatccaaaaaatgagagggaaacgccttgttgattttccagtacaaaacccaggaccaccagcgctacaaccaataccgtcagcaccaggacgacacgcttaaccccacgcataaatttctcctactccaaaaacactcagacgccctcttcctcctcttcgttcacccgatcgcgcaattccttgcccggcttgaagtgaggcacaaattttccgtcgaggctgacggactgaccggtctttgggttgcgacctacgcgcggcgcccggtagtgcagtgagaagctgccgaaaccccggatctcgatacgatctccggtagccaggcactgggacatttgctcaagcatggtcttgatagccagctccacatccttggatgaaagcagcccttgatgggtgacaattcgttcgatcaactccgacttcgtcatatttttcccttctttttcaagcagctaggaaaagcgcttcgaaggttttagcacgacttgatgaatttgaacagcccactgacccacttatctaccagataaatccatacccgcaaacacacttacaacctcaattacaaatgaccagcatggtacgagttacagcaccggcagggttccaaccaaacaggtagtcaccctcttcatccttggcatcgcttgaccggacaatgaccttgtagccttgcatcttgcattctcgcgcagcgcgcctctcgcacttatcccaacccgaaccaagaccggaacagtcgatctcgatgccactgacgccacgcttggcatgggtcttggcgctggtggcggaacagcccgagagcacgatcactgccaatactacgatcagcctcttcatctgaatccttattgaaacaacagcacgaaaaatcacctctctgaaactatagtcagttccatgtccaagctgtagacctcccttcccaactgttgattcaacgaatttcaggcacaaaaaagggcgaccgaagtcgccctttttaacagctttacaaaacttagttctgcttggccattgcttcacgcagcagggaagccatagtggtttcgcctggagctgcagcttccggagcggatttcaggctctggattgcttctttctcttcagcatcatctttcgacttgatggagagttggattacgcggctcttgcggtcaacgctgatgatcttggcttctacttcctggccttctttcagaacgttacgcgcgtcttcaacgcggtcacggctgatttcggaggctttcagagtcgcttcgatatcgtcggccagagtgatgatggcgcctttagcgtcaacttccttcacgatgcccttaacgattgcgcctttgtcgttgtcctgaacgtattcagagaacgggtcgctttccagttgcttgatacccagggagatgcgctcgcgctctgggtcaaccgacaggataacggtgtccagctcgtcgcccttcttgaaacgacgaacagcttcttcgcccacttcgttccaggagatgtcggacaggtgaaccaggccgtcgatgccgccgtccagaccaatgaagataccgaaatcggtgatcgacttgatggtgccggagattttatcgcccttgttgaactggccagagaaatcttcccatgggttagatttgcactgcttgatgcccagggagatacgacgacgctcttcgtcgatgtccagaaccataacttccacttcgtcgccgacttgtacgactttcgaagggtggatgtttttgttggtccagtccatttcggaaacgtgtaccaggccttccacgccttcttccagctcagcgaagcagccgtagtcggtcaggttggtaacacgcgcggttacgcgagtgctttctgggtaacgggctttgatagcaacccatggatcttcacccagttgcttcaggcccagggaaacacggttgcgctcgcgatcgtatttcagaaccttgacatcgatctcgtcaccaacgttgacgatttcggaaggatgcttgatgcgcttccaagccatgtcggtaatgtgcagcaagccatccacgccacccagatcgacgaatgcgccgtaatcggtgaggtttttgacgatacccttgacttgttggccttcctgcagggattccagcagagcttcacgctcggcggagttctctgcttccaggacgctgcgacgggaaacgacaacgttgttgcgcttctggtcgagtttgatgaccttgaattcgagttctttgccttccaggtgcgtggtgtcgcgcacaggacgaacgtcgaccaaagaacctggcaggaacgcacggatgccgttaacgtcgacagtgaagccgcctttaaccttaccgttgataacgcccttgaccacttcttcagctgcgaaggctgcttcgagaacaatccagcattcagcgcgcttggctttttcacgggacagcttggtttcaccgaaaccgtcttcaaccgagtccagagcaacgtgaacttcgtcaccgacattgattgtcagatcgccagcatcgttgtagaactgttccagcgggatcagagcttcagacttcagaccagcgtgaacggttacccagcgagcttggtaatcgatatcaacgataacaccggtgatgatggagccagcctgaaggttcagggtttttaggctttcttcaaagagttccgcaaagctttcgctcattttaattcctgttgataagggcgaagaatacgcccatctccacaccccagacggtgtgggtcagtttcagttaaaagaagccaccgcaggactatgactggtcccctgcggccttcttgatcatccggcgatatcgcgaatggcgatttcactcaggatgcgttccagcacctgctcgatggacaactccgtggaatccagctgtatggcgtcagccgccggcttaagcggggctaccgcacgctgggtatcacgctcatcgcgtgcacggatctcatctagcagactcgacagactaacaccatcgactttgcccttcaactgcaagtagcggcggcgagcccgctcctcggcgctggcggtcaggaaaatcttcaatggcgcctcgggaaaaaccacggtgcccatatcacgaccatcggccaccaaccccggcggttcctgaaaggcccgctgacgctgcagtaaagcgtcacgcacagccggcagcgcggcaacctgagacgcccaggaacccacttgctcattacgcaggtcatcggtcacgtcatccccttcgaggataatgcgttgtggatgaccttctgtcgccccgacgaactgcacatcaagatgtgccgccagcagcttcaaggattcttcgttggtcaggtcgacgccatgattacgtgcggcaaaggccagcaagcggtacagcgcgccggaatccagcagacaccagcccaggcgcttggccaggatgccggcgatcgtgcctttgcccgagccacttggcccgtcgatggtaatcaccggtgctttgatattcacaattgagcctcttgggcaacacggatgccgacttgggcacacagtgtaagaaaattcggaaaagacgtagcaacattggcgcagtcacggatacgaatcggcgccgtcgctcgcagagacgccacgctgaatgccatggcaatgcggtgatcgccatgggcatgcacctcgccaccgcccatcgggccaccctcaatgataatcccatcaggggtcggttcacacttcacgcccaacgccagcagaccatcggccatcacctggatacggtcggactccttcacgcgcagctctgaagcgccacgcaacaccgttcgcccttcagcacaggccgccgcgacgaacaacaccggaaattcatcgatcgccaacggcaccagcgcctcgggaatctcgatacccttcagcggtgccgctcgtacgcgcagatccgcgacaggctcaccacctacctcacgctggttctccagggtgatatccgcgcccatcagccgcaggatatcaatcacgccggtgcgcgtgggattaacgcccacatgctccagcagcagctcagaaccctcggcaatcgaagctgccaccagaaagaacgctgaagaggaaatatcccccggcacttctatatgggcagccgtcagcgcatgaccggactccaccgacgccgtcgcaccctccaccgccaccggataaccaaagccacgcaacatgcgctcggtgtggtcacgggtcggcgcaggctcggtcaccgcggttttaccttcagcgtacaacccggccagcaataggcaggatttgacctgggcactggccatcggcattgcataagccagccctttcaacgactggccaccccgaatggtcagcggcggacgcccttcaggccccgtctcgatcaccgctcccatttcccgcagcggcttagccacacgattcatcgggcgcttggacagggaagcgtcaccagtcagcacactgtcgaagctctgcgctgccagcaaaccggacagcaaacgcatggaagtaccggagttaccgagataaatcggccccggcgctggcttcaggccattcagcccgacaccatgaatggtcacgcgcccatgatgcgggccttcaatcaccacgcccatgtcgcgaaacgcctgcaaggtcgccagggcatcttcgccctcaaggaaaccttcgacctcagtcacaccctcagccaacgaacccagcatgatcgatcgatgggagatcgacttatcgcccggcacccgaatgcttccgctcaagcggccacccggttcggcgagaaaggtcagctcatcagcgttcacagcggtttccatgtaggcccggcgcgccaggatcttgctgaaatgttcacgcgccacccgcgcacgggtgaacacgcccaataactgatgaccatcccctgcatcgaccgcgtcgcgcaaggcgtcgaggtcgctgcggaaggtgtccagggtgcgcaacaccgcctcgcgattggcgaggaagatgtcgtgccacatcaccgggtcgctgccagcaatccgcgtgaaatcgcgaaaaccaccggcggcgtaacggaagatctcgaggttctcgttgcgcttggccagcgagtccaccaagccaaatgccagcaagtgcggcagatgactggtagccgccaacacttcatcgtggcgctcgacctgcatatgctcgacatcggcccccagctcgcgccaaagacgatccaccacggccaaggccgccgggtccgtttcttccagcggcgtcaaaatcaccttatggcgacggaacagctgcgcattggacgcctcgaccccgctctgctcggagccggcaatcggatgccccggcacaaacctcgccggcatgccaccaaacgccacttgggccgcacgcaccacattacccttggcgctgccgacatccgtgagaatcgcctggccaaggtccataccagccaacaacgccaacattttttccatggccaggatcggcaccgccagctggatcacatccgcaccctggcacgcgagcgccaggtccgcctcacaacgatccaccacgcccaactcaaccgccagcttgcgcgattgcgggtccaggtccacaccgaccacttcgccgcacagcccgctttcgcgcaagcctttggcgaaggagccgccgatcaaacccaagccgaccaccaccaggcgaccgatcataggcacagcaggttgcaatgcagtgacatcaaccacgggccagaaccttggccaacgcctccaggaagcgggcgttttcagccggcaggccgatggtgatgcgcaggtggttcggcatgccgtagttggcggtcggacgtacgatcacgccttcacgcaacaggccctggaacaccggcgcagccacttggccgaggtcgacacaaatgaagttgcccttggacgggatccagcccaggcccagctcacggaagccttcctgcagttgcagcatgccgctttcgttgatacgacgaccttcttccaggtactcggcatccttcaccgccgcgcaggccgccgccagggcgaggctgttgacgttgaacggctggcgcacgcggttcagcacgtcggccaccacggcagtggacaggccgtaacccacccgcagcgacgccaagccatacgccttggagaaggtgcgcgaaaccagcaggttcgggtacgccgccaggaaatccaggccatccggcaggtcaccgccttcggcgtactcgatgtaggcctcgtccaacaccaccaacacctgttccggcacgtcttgcaggaagtcattcagcgcctgggcgtcgaaccaggtgcccgtcggattgttcgggttggcgatgaagaccacgcgggtctgcgcatcgatagcggccagcatcgccggcaggtcatgaccccaatctttcgcaggaaccaccttggcatcagcgccaaccgcttgagtcacgatgggatagaccgcaaaagcatgctcactgaagactgcattcaagcccggagccagatacgcacggccgaccagttcgagaatgtcattggagccgttgcccagggtcacttgactcagctcgacccggcacttttctgccagcagggtcttgagagcaaaaccattgccatcgggatagcgcgtgagctcggccaattcgtcgcgaatcgccgccaacaccttcgggcttgggcccagcgggttttcgttactggccagcttgacgatgttcgccggatccagattcaactcacgcgccagttcgtccacaggcttgcccggaacgtaaggcgacagttgttgcacgcccggctgtgccagggcgaggaagttgccactcatgttaaagcctcacaaaaccgctttcgggtaagagcccagcaccttgagtgccacggcttcctgactgattctctccagcacacctttgaccagcgggtcgcgatggtggccgatgaagtcgataaagaacacataagtccatttaccgctgcgcgaagggcgagtttcgatgcgcgtcaggtcaatcccgttatcgtggaacggcaccagcagctcatgcagcgcgccgggcttgttgctcatggagacgatgatcgaggtcttgtcgtcgccagtcggcggcacttcctggctgccgatcatcaggaaacgcgtggagttgtccgggcgatcctcgattttctcggccaggcgcgtcaggccgtacagacccgccgccatatcaccggcgatggctgccgaattccactcacctttaactcgcttggcggcttcggcgttgctggacactgccacgcgctcgacattcgggtaatgcgcgtccagccacttgcggcactgggccagggactgagcgtgggagtagatacggctgatgctgtcggtcttggtgttttcacccaccaacaggtggtggtgaatgcgcagctcgacttcgccacagatcaccatgtcgtgctcaaggaagctgtccagcgtgtggttgaccgcgccttcggtggagttttccaccggcaccacaccaaaattcaccgcaccggccgccacttcacggaacacttcgtcgatcgccgccataggcttgctgatcaccgcgtggccgaagtgcttcatggctgccgcttgggtgaaggtaccttccgggccgaggtaagccactttcagcggctgctccaaggccaggcacgaggacatgatttcgcggaacaaccgcgccatctcttcgttgcccagcgggcctttattccgctccatcacgcgcttgagcacctgggcttcacgctcgggacggtagaacaccggcacttcgccttccgccagagacgccattttcacccgggccacttcctgggcgcagcgcgcacgctcactgatcagttccaggactttctcgtccaggctgtcaatgcgtacgcgcagggccttgagttcttgctcagacattagccgtgttccttttcgaactctgccatgtaggccaccagcgcgttgatcgcgttgatgtcgacagcgttgtagatggaggcgcgcatgccaccgaccgaacggtgacccttgaggttcagcaggccgcgagcgtcggcaccggccaggaatggcttgtccaggcgatcgtcagccaaacggaacggcacgttcatccacgagcggtccgtcaggttgatcgggttgctgtacaaaccgctggcgtcgatgaagtcgtacaggacgcgcttcttctcttcgttcagcttgcccatggcggcaacaccgccctgctctttcagccattcgaacaccaggccggagaggtaccaggcaaacgccggcggcgtgttgtacatcgagccgttatcggccgcgaccttgtagttgagcatggtcgggcacagcgagcgcgcgcgacccagcaggtcttcacggatgatgttgaccaggataccgcttgggccgatgttcttctgcgcgccggcgtagatcatgccgtatttggacacgtcgatcgggcgcgagagaatgtccgaggacatgtcgcacaccaacggcacgtcaccgacttccggcacccagtcgaactccaggccgccgatggtttcgttcgcgacgtaatgcacgtaggcagcgtccttcgacagcttccactcgttctgaccgggaatggcgaaatagtcgtacggcttggcggtaccggcgacatttacatggccgtagcgcgaagcttcttcaatagccttttggccccagataccggtatcgatatagtcagccgtgccgccttccggcagcaggttcagcgggatctgtgcgaactgctggctggcgccgccttgcaggaacagcactttgtaattggaggggatgtccagcaagtcgcgaagatcctgctcggccttggtggcgatagatacaaactcatcgctgcgatggctcatttccatcacggagaggccttttccatgccagtcgaggagttcaccctgcgcacgctgcaggactgcttcaggaagcgccgcgggaccggcacagaagttataggctctcttgctcacatccaatctcactctgatctggtggggctgcaatcatgttcggcaacaaccgttctctgaagcgaacccttgtgggagctggcttgcctgcgatacaggcacctcggtagctcagtgataccgcggtgatgctatcgcaggcaagccagctcccacaggggccgcgcccggacacagttgtgtatttcataagggacaaacaacaagggggcgaatcttcatccgccccctgtgtgtccgcttattcctgcggttcttcttcgtctgcggcagcgtcgagggtcggctcgtcgacgttgtcatcgcctgctgcgatcacctcaccttccagctcttcgccttcaacttccgacggctcctggacacgctcaaggccgacgagtttttcgtccttggccagcttgatcagggtcacgccctgagtgttacggcccaggctcgacacttcagccactcgagtacgcaccagggtgccctggtcggaaatcagcatgatttcctcgccatcgagtacctgcaccgcgccgaccagacggccgttgcggtcgttgctgaccatggcgatcacgccctggccgccacgcttgtactccgggaactcgctgatggcggtacgcttgccataaccacgctcggaagcggtgaggatctggctgccttcttcggggatcagcatcgaaatcagcttctgcccttccggcaggcgcatgccgcgcacaccgcgggcggtacggcccatggcgcgaacgtcggattccttgaagcgcgtgaccttgccaccgtcggagaacagcatgacttcacgctccccatcggtaatggcagccgaaatcagcacgtcgccttcgtccagctccagggcgatgaggcccacgctgcgttgacgactgaaggattccagcggggtcttcttcacggtgcctttggcggtggccatgaagatgtagtgaccttcggtgtattcctcgaccggcagcatggtggtgatgtattcatcactgtccagcggcagcaggttgaccagcgggcgaccacgggcagcgcgggacgcttccgggatttcataggttttcagccagtacaccttgcccttgctggagaacagcaacagcgtggtgtggctgttggcgaccagcaggtgagcgatgtagtcctcatccttcacgccggtagccgacttgcctttaccgccacgacgctgagcctggtacgcagccaatggctgggtcttggcatagccgccgtgggagatggttacgacgcgctcttcttccgggatcatgtcacccagggtcaggtcgaggcgggcatcgagaatctcggtgcggcgcacatcgccatattcggcgcggatcacttcgagctcttcgcggatcacttccatcaggcgcacggcgctgttgaggatgcggatcagctcgccgatctggttgaggatctcctggtactcggccagcagcttctcgtgctccaggccggtcaggcggtgcaggcgcagctcgaggatggcctgggcctgttccggcgacaggaagtacttgccttcgcgcaagccgtattgcgggtccagggtctccggacggcacgaatcggcgccggcacgctcaaccatggccaccacggcgctggattcccaaggcgtgctgatcagcgcttccttggcttccgacggggttggcgaggccttgatcagcgcgatcaccgggtcgatgttcgacaacgcaaccgcctggccttccaggatgtggccgcgttcgcgggccttgcgcagttcgaacacggtacggcgggtgaccacttcgcggcggtgacgcacgaaagcttccagcagatccttgaggttcaggatgcgcgggcggccatcgatcagtgccaccacgttgatgccgaacacgctttgcagctgggtctgggcgtagaggttgttgaggatcacctcaggcacttcgccacgacgcagctcgatcaccacgcgcataccgtctttgtcggactcgtcgcgcagctcggtgatgccttcgagcttcttctctttaaccagctcggcgatcttctcgatcagacgcgccttgttcaactggtaagggagttcggtgataacgatctgctgacggccaccgaccttgtcgatgtcctcgatcatcgagcgggcgcgcatgtaaatgcggccacgaccggtgcggtaggcttcgatgatgccggcgcgaccgttgatgatcgccgctgtcgggaagtccggacccgggatgtattgcatcagctcatcgacggtcagctcaggattgtcgatgagggccaggcaaccgtcgatgacttcaccgaggttgtgcggcgggatgttggtggccatgcccacggcgataccgctggagccgttgaccagcaggttgggaatacgggtcggcatgaccgccgggatcatttcggtgccgtcgtagttcggcacccagtccacggtttctttatgcaggtcagccagcagctcgtgcgccagcttggtcatgcgcacttcggtgtatcgcatggccgcggcgttgtcgccgtcgaccgaaccgaagttgccctggccgtctaccagcaggtagcgcagggaaaacggctgagccatccgaacgatggtgtcgtacaccgcagtgtcgccgtgagggtgatacttaccgatcacgtcaccgacaacacgggcagatttcttgtacggcttgttccagtcgttacccagctcgctcatcgcgaacagcacacgccggtgcacgggcttcaagccatcgcgcgcatcaggcagtgcccgaccgacaattacgctcatcgcgtagtcgaggtaggactgtttcagctcgtcttcgatattgaccgggaggatttctttggccagttcgcccatgagaagcctgattcctttttcgggtgaaacctcgtcacatcctatgggacgaacgaagctcgccgttgccgacaaagtgcctgacaacgacttacgacaaatcaacgagttatgacacggatctgcacgtttaaggcaacccctcggggcaaccctggaaaccgccggatgttatcacaatcgccgccacgcacctatccctctgatgcgcatggaggctagtaatttgacggatgacaggcttgaaggggacgagagaggctcagagctgggtgggtgccgttttttgagggtggatccaagggttttattgacttaaaggaccaatcgcgggcaagcccgctcccacatattggcccgtgaacgcggcaagtgtgggagccggcttgcctgcgatgacgacttcacaggcaccaaagctttcaatgcaaccgtttacggcacatcaacttggccaatttggccgtatccggccgctcgacgatgcccttctcagtcacgatcacatcaatcaaatccgccggcgtcacatcaaacaccgggttataggtttgaacatccgcagcaaaccgctgaccagccacctccagcaactcccccgaatcacgctcttccagcgccacgtcatcgccagtggccatcatcagatccagggtcgaactcggcgccaccaccataaagcgcacaccatggtgcatggcgcacaccgccaactgataggtgccgatcttgctgatcacatcaccgttggcggcaatgcagtcggcgccgacgatcacccaggtcacgcctttggtcttgagaatatgtgcacccgcagaatcggcattcaccgtcaccggaatgccctcgcccgccaattcccaggcggtcagccgtgaaccttgcaaccacggtcgggtttcattggcgtaaacctgctcaatcatgccttccaggtaggccgcgcgaatcaccccaagggccgtccccacgccgcccgtcgccagcgcaccggcattgccgtgagtcaggatcgcctgggcattgccctgatgcttgcggatcagctctacacccaactgcgccatggtcagattggcctcgcggtcactttcatggatcgcaatggcttcggcttccagcaccgcgagcgggtcagcgtgcttcttgacgcggtccagacggtcgcgcatgcgcttcaaggcccagaacaggttggacgccgtggggcggctatcggccagcagtgcgtagtcttcttcccacgcggcctgccagtcaccgccctcggcgatacgttcacgggcggcgagcaccaagccataagccgcactgatgccgatggccggcgcgccacgcacgaccatcgcacgaatcgccgccgccacttcctcagccgtggagcaagccacccagctttcccgggacggcaaggcacgctgatcgagcaggtacagcgcgccatcacgccagtcgatggccttcactttctctgcagccaacagtcggtcgcgcatcccttaccccgcactcatgaacaaaagccgccgattatagcgatccgccagcggggacgctcgggtatacttcgcccttcttttatagctgcccgggaagaagcctgcgatgacctccactgccgccccgctcgacttgctgctgctgcccacctggctggtacctgtcgaacctgccggtgtggtgctcaaagaccacggcctgggcattcgtgacgggcgcatcgcctttatcgggccacgggcggcggccctgaagctggcggccagcgaagtgcgcgaactgcccggcatgctgctcagccccggcctgatcaacgcccacggccatgcagccatgaccctgtttcgcggcctggccgacgatttgccgctgatgacctggctcgaaaagcacatctggcccgccgaagccaaatgggtcgatgaagcctttgtgcgcgacggcaccgatcaggccatcgccgagcagctcaagggtggcatcacctgtttctccgacatgtatttctaccccaaggtcgccagtgactgcgtgcacaacagcggcatgcgcgcgcagattgcgctgccgatcctcgacttcccgattcccggcgccgccagcgccgacgaggcgatccgccagggcgtcgagctgttcggcgacctcaagcaccacccgcgcatcaagatcaccttcggcccccacgcgccctacaccgtctgcgatgaaaacctcgagaaaattcgcatcattgccgaagagctggacgcatcgatccatatgcacgtgcacgaaaccgccttcgaggtgcagcaagccgtcgagcagaccggcgagcgcccactggcacgcctgggtcgcctcggcctgctgggcccgcgcttccaggccgttcacatgacccaaatcagcgaagaggacctggctttgctggtagaaagcaacaccagcgtcattcattgcccggaatcgaacctgaaactggccagcggcttttgcccggtggagcgtctgtggcaggctggcgtcaatgtggcgatcggcaccgacggcgccgccagcaacaatgacctcgacctgttgggtgaaacccgtactgccgccatgctggccaaggccgtcgccggctcggccacggccctggacgcccaccgcgccttgcgcatggcgacgctcaacggcgcgcgagccatgggcctggaaagcgagattggctcgctggaggtcggcaaggcggccgatgtcgtggcctttgatctgtcggggctcgcgcaacaaccgatctacgatccggtctcacagcttatatatgccaccgggcgcgattgcgtgaaacacctttgggtcgccggcaagcagttgctcgacgaccggcaactgacccgcatggatgaacagcagttgatcgccacggccattgcctggggcaaacgcatcagcgggcacaccgaataacgacggctttgaacctgtgcgttcagagctgacacaccgatttatcagatttagaggattcaccatgagcaacgtcgaccacgccgagatcgccaaattcgaagccctggcccatcgctggtgggaccgcgagagcgagttcaagccgctgcacgacatcaacccgctgcgcgtcaactggattgacgaacgcgtcaacctggccggcaagaaggtgctggacgtcggctgcggcgggggcatcctcagcgaggccatggcccagcgcggcgctaccgtgatgggtatcgacatgggcgaagcgccactggccgtggcccaactgcaccagctggaatccggcgtgagcgtggaataccgccaaatcaccgccgaagccctggccgaagaaatgcccgagcagttcgacgtcgtgacctgccttgaaatgctcgaacacgtgccggacccgtcctcggtgatccgtgcgtgcttccgtatggtcaagccgggcggccaggtgttcttctccaccatcaaccgcaaccccaaggcctacctgttcgcgatcatcggcgccgaatacatcatgaagctgctgccgcgcggcacccacgacttcaagaaattcatccgcccgtccgaactgggcgcctggagccgtcaggccggcctgactgtcaaggacatcatcggcctgacctacaacccgctgaccaagcactacaagctggccagcgacgttgacgtcaactatatgatccagaccctgcgcgaggagtaagcctgtgaagttgcgagcagttctcttcgatatggatggcaccctgctggacaccgcgccggacttcatcgccatctgccaggccatgcgggccgaccgtggtttggagccgatcaacccgcagcacatccgcgatgaaatttccggtggcgcgcgggcgatggtcgccgtgaccttctcgatggaccccgaatccccaggctttgaagcattgcgccaggaattcctcgagcgctacctcaaaggttgcgcaatccacagcaagctgttcgacggcatggctgagttactggcggacatcgagaagtccaacctggtgtggggcgtggtcaccaacaagccgctgcgctttgccgaaccgatcatgcagcaactgggcctggccgagcgttcggcactgctgatctgcccggaccacgtgaaaaacagcaagcctgacccggagccgttgatcctggcgtgcaagatgctagacctcgacccggccagcgtgctgttcgtgggcgacgacttgcgcgacatcgagtccggccgcgacgccggcacgcgcactgcggcggtcacgtttggctacatccaccccgacgacaacccgcgcaactggggcgccgacgtggtggtggaccacccgttggaactgcgcaaggtgctcgatagcgcgctgtgcagttgctgattgttcgaagctctcacaaacaatgaggccagctcccacaggaaatggattccacttcaagtgctgtatcaccttgaattctgtcgaggctatttatgtttgattactccgcacgcccggaactgctcaaaggccgtgtgatcctggtgaccggcgccggtcgcgggatcggcgcagccgctgcgaaaacctatgccgcccacggcgcgaccgtgctgttgctgggcaagaccgaagccaacctggcgcaggtgtatgacgagatcgaggccgccggccagccgcaaccggtggtgatcccgttcaacctggagactgccctgccccatcaatacgatgagctggccgcgatgatcgaaaaagaattcggccacctcgacggcctgctgcacaacgcttcgatcatcggcccgcgcacgccgctcgagcagttgtccggcgagaacttcatgcgggtgatgcacgtgaacgtcaacgcgatgttcatgctgaccagcaccttgctgccgttgctcaagctgtcccaggatgcgtcggtggtgtttacctccagcagcgtagggcgcaaaggccgggcttattggggcgcttatggcgtgtcgaagtttgcgaccgaaggcttgatgcagacgctggctgacgaacttgaggatgtggcgtcggtgcgttccaacagcatcaacccgggcggcacgcgcaccagcatgcgggcccaggcatatccgggggaaaacccgatggaaaggccggcgccggaggagataatgccggtgtacctgtacctgatggggccggacagtgcgggcatcaatggccaggccttcgacgcgcagtaactcctgacgccacaaaaaccaaactgtggaaccgggtttatgtgggagctggcttgcctgcgatggcatcaccgcggtgtacctgacacaccgaggcgatgccatcgcaggcaagccagctcccacacaagcccggctctcgcatttgttcagaaatgtggtttagtttttcaccacttcctcaagggtgaaccgccccaacggattctgcaggaagttgctcacgttcttgcgtgagatgttgatatacgggctgtagtacaggtcaatccagttcacgtcctgtttcgccagtttctgcaactccacatacatctgctcacgcttgaccgggtcggcttcgatccgcgcttgcgccaccaacgccttgaccgtgtcattcttgtaacgggtcatgtagttctggttggtgtcgtggcccagcacgaaggtagtcttctggtccggatcaagaatgtcgttggtccagtacatcaccgaaatgtcgtactcaccgtccaccagcatctgccagctttgggtcgggtcgactttctgcaggttggcggtcacgccgaccttggccaactggtccttgatgatcaccgcaatctgctcgtcggcttcgttgccggcgttgaccacgtagttgagcttcaagtccttggcgcccgcctcttccagcagctttctggcggcagtcgggtcatacggacgttgcaggttgttggcgtagtggtacagcgaacctttcggaatgtaggaataagctacggtgccctgaccgtaagtggcggtcttcaccagcgattgtttatcgatggccatgtccagtgcctcgcgcacttccttcttggccagcagcccgtgggcgtggttgatcagcaggtgatcttcacgggtggacgggtcggcgtggatgaccacgttcttgtctttcttcagctcttcaacccgggaaaacggtacgaagatcgccgtgtcgagctcgttgttctgcaccatgcgcatgcgcgtgttgtcgtcggtcaccgagacccactccacgccgtccaggctgacgtttttggcctgccagaaattcgggttcttcttgagaatcacccggtcacccttgcgccattcctccacggtaaacgcgccggaggtcaccgggctttccgaataggcgtcttcgcccatcttggtcatggctttttccgacaggatcgacaccgtcggcgacgccagttgcgagagtaaggcaacagccggggttttgagagtgaccaccagggttctcgggtccgacgccttggccgtattgatcaagttaaacgggtcggcccacaaggaggctttgttgtcgcggatgcgcagcaagctgaacgcggcatcgtcggccgtgatggccgaaccgtccgagaacttcgcgtcacgcagtttgaaggtgtaagtcaggccgtccttggagatatcccagctttctgccaggcccggttccattttggtacccaggttatccacgcgcaccagggtgtcgtagacgttggcgaacacccaagtgtcgcggttttgcgcgcttttgatcgggtcgaacgtggtgctgtcttcacggcaaccgatagtcaggacaccagcggcctgtgccagcccggcggtcagcgaccacgcggtaagcgtggcggcggcgagtagcttcaagtggcgcgattgcatatcacaactccttgttaatgaatggcagagggttagagcaacggttcttcaagcacgcaactgtatcgatgctcgtgcagaaaatgggtaggcggcaacaccacggaacacatcgtccgagcatgccggcaacgcgggtgaaaggcgcaacctgtgggcaaattcagcgggctgggtggctcaccgggcaaaggttctgccggcaaaggccgatgcggatcaatttcgggaatcgcctcgatcaacgccgccgtatacggatggcgcggcgaagtgaacaccgcctccaccggtccttcctcaacaatcttgcccaggtacatcaccgccacgcggtcgcacaggcggcgcacgatggccaggtcatgggcgataaacagaatcgccaggttcatgcgctgttgcagttccaacagcaggttgatgatctggccctggatcgatacatccagcgcggccacgcactcatcggcgatgatcaggcgcggctccaccgccaaagcccgggcgatgccgacacgctggcactggccgccgctgagtgaaccgggcttgcggtttgccagctcggggcgcagccccaccaaatcgagcagttcgttcacgcgcgcagggatctgcgcaggcgcgactttgcgctgcacgcgcaacacttcggcgatggtttcaccgatggtatggcgcgggttcagcgcggcgtaggggtcttgaaagatcatcgcggtttcatggcgcagccgggcgatgtcgatggggctgccgtgggccatgtcgatgccgtcgaacaacacctgcccggcgctgatcgggttgaggtgcaaaatcgcccggcccagtgtgctcttgccgctgccggactcgcccaccaaccccagcgtttcgcctgccgccaagttcattgacaccccgttcaccgccctcacccactgtttgttcaggccgaggaagcccgtaccggaagcggcaaagcgcacctcaaggtccttgatctgcaacaggctcatgaacgggctcccagcggatagtgacaggcgacgcgcgcgccctcgggcagtaactcggtgcacaaggcacccacctgcgggcagcgcgggttgaagcggcaaccggcgggcaatgcgtccagcaacggcggctggccgggtatggtgcgtagcaaggcgtggccgctgctgtgggccggctgacagtcgatcaacccggcggtgtacggatgctgcggatgggccagcaggtcgtacttgctgccgtgttcacacaggcgcccggcatacatcaccgcaatggaatcacaggtctgcgccaccacgccgaggtcatgggtaatcatgatgatcgacaagccgcgcctatcgcgcaaatccagcagcaaccgcaggatttgcgcctgcaccgtcacatccagcgcggtggtcggctcgtcggcgatcaacacgttcgggctgcagcccagggccaccgcgatcatcgcgcgctggcgcatgccgccggaaaactcatgggggtagttgtcgacccgcgcctgcgggtcgggaatgccgacctggcgcagcacatcgatcgcttgcaggcgtgcgtcttttttcgacgcaccttgatgcaaacgaatgccctcggcgatctggtcgccgatgcgcatcagagggtcgagatggctgctggggttctggaagatcatgcccagttgcccgccacggacctcgcgcatgccagcgtcgtccagcgtcaacaggtctttaccggccaggcgcactgaaccgccttgcacacgcaggccgggcgacggcaacaagcgcatcagcccgcgacaggccagggtcttgcccgaaccgctttcgccgaccagcccgagaatttcaccctcggcaaggtcgaaagacacgcgatcaaccaacgtcacatcgcgcccggcgttgttggcgatcacgctgagatcgcgcacttgcagcaggctcatgagcgatcccccagcacttgcgccacaccgtcggcgagcaggctgaagcccatggccagggtcacgatggccaggcccggaaacgtgcagatccaccacgcggtcgtgataaacgcctgcccttcggcaaccatcgtgccccactcggcggtcggcggttgcacgcccaggcccaggtaactcacggccgcgccattgagcagcaccagcactgcatcagacatggaaaacacaatcgagccgaacatcgcattcggcaacaaatgccggaacaaaatacgcccatggccaaagcccaggctcttggcggccagggcaaactcgctttccttgagcaccaggatttgcgagcgaatcagccgcgcatacgacacccaacccaccagcgccatggcgatataaaaactcttcaagcccggcccgaggatcgccatgatcgccagcatcagcaccaggaagggaaaggccaggaccacatcgatcacacgcatgcagaagctgtcgaaacgcccgccgatatagccgcagaccgcgcccacgaaggtgccgatcatgaacggaaagatcacgccgacgatggccagttgcaggtcgatgcgcgcgccccagatcaccctcgacagaatgtctcgtccgtaattgtcggtgccaaaggggtgggccaggctgggcgccaacaagctgaaatcagtgttctgggctatcggatcatagggcgcaacccacggcgcgaacagcgccagggccaaccaggtgaacaggatcagcaagccccatgcggcggtcagtcggccgttgcgaaagccaaagcgcaggcgcaaacgccagggggcaatcagtgggcggccgctcattgcatcttcacccgcgggtcgagggcgaccgttgccacgtcagccaggaagttgaccaccaccgtcgcgcaggccagcaccatcgccacgccctgcaccaccatgtagtcgcgcgtgaaaatcccgcgcaccagcaattggccgatgccgggaatggcaaacaggctttcaatcactaccgtgccactgatcagccagccgatattcaccgccagcaggttgacggccggcaccagggaattgggcagcacatggcggcggaacacggcggcttccgacagcccgcgcgcccgggcggcggtgacgtggtcggcctgcaattccatcaacatgctcgcgcgcaaattgcgcaccaacaccgccgacagtgccagtgcgatggtcaggcacggtaggaccatgtggtgggccttgtcgagaaaggtgcgcccgtaaccggaaaccggaaacaagccccactgcacactcagcaataaaatcagcatcaagcccagccagaacgcgggcatgcccaaccccaccgtggtgaacacgcggatcaggttatccgcccacccgcctttattgcgcgccgccaccgtcgccaacggcaccgcgatcaacagcgccagcaccacgctgccaagcaccaagacgagcgtcggctcgatgcgggtgacgatcagtttcaaggcatcgactttatagagcagtgactggccgaggtcgcccttgagcaggtttttcaggaagtagaaatattgcagccacagcggctgatcaaggccgtactgcgcgcggattttcagcaaggcgtccggcgtgctgcgcgagcccagcagcgcgcgagccgggtcgccgggaatcgagcgcaccagcacaaaggtgatcaggctgatgccaaacaataccggcagcaattgcagcggccgggacagcacaaaacgataccgcgacaggttcatccgtcagccccggtggcgcgcgaggaagtccagcagcaccgggaagtacgcctgaggctcttcgtaaaatggcatgtggctgctgttggggaacacgtgcaattcggcgtgccgcgcggccagtttcatgcggtgggcgcaggccggcgtgagttcgtcgtgctggccggtggtgatcaggatcggcatcgtgaagtcggccatctccttgatgcggttccagtccttgaggttgccgatgtagagaaactcgttggggccttgcatcgtctcgtaagggcccatgttccagtcgccgagagaacgtttgaccggcgccggccactcgtccaggcggcacacatggcggtaattgagcaaggtgatggcggcctggtattgcgggtgatccagggtgcccatggcttcatggcgctgcatcattgccacggtctcgctgccgagcgcgccgcgcaggcgttcgagttcttgagagaggtgcggaatgtcgccgacggtgtttgccaggatcaggcttttcagcgcatcggggtaatggatggcgtattcaataccgagccagccgccccaggaatgccccagcaaatgcacgcggccaaggttcagcgcctggcgaacggtttcgacttcttcgacataacggcggatttcccacagagaaacgtcagtgggtctggctgatgcgccggtgccaagctggtcgaatgcaaccactcgcaggttatggtctttgagccagccatgggcgtcgcgcaagtagtcacacggcaggcccgggccgccgttgaggcacagcagcacctcatcgccttcgccaaagctgtagaccacgatgttgtggccgtcgacactcacgttgtgttgctggtcgggggcaatttcacgccacatgcatacattccttgtgttgtatcggcctggcaggcagcggccgtttatcaggccacactaccgaggatgccgtgcgtccataacctagtatttcttataggtttggcctggcagtccttcgccggggcgtggcattctacttgccgcaagtcgagattcaaatgaattcgggagcagaacggatgctggccaggctagctgccttcaatagtcgactcatgccgggcaggagcctggatgagcagatggacaacaccttcatcctcgcccagcagttgggtttcgacgcgctggtgtatgactacaccccggtgcccctggaccatgacggcgccctgatcaccccctcggtgctggaattgcgcaacacgcccaccgactggcacgccttgtggtgcagcgaagggttttaccagatcgacccggtgcagcatctggccctgagcacggtgtcgccgtttgtgtggtcgtacgaggcaaaggccgataccgcgctgcaaaagatcatcgacccctgccatgcgccggtctcttcttatctgcatgagcgccaactgacctgcggcgtcagcgtgccgattcacctgccccggggcggcttcgcctcgctgaccggtttgcgcaccggcaaggcccacaccgtattgaaggacgcacagcagacgctcgccgatttcagcctgatcacccacgccttgcaggaagcggcctacccgctgttcagcaaagagctacgcacctacccgcatattcatctgaccaaacgcgagcgcgagtgcctgaaatgggccgccgacggcctgaccgccgccgaaatcgccacgcaattgagccgttcgctggcagtggtcaccctgcacctcgcatcggcgatgcacaaactcggcgccaagaaccgggtacaggcggtcgtgcgcgccacccattaccgcctgctggaagattgacctctcggtaaaacctagctgttttgctagttacctaaaacgtgcgcgacgactatcgtgtctctgatccttttttttcagagcagggtacgaaatggagttcattgaaaacatccgcgaaggttttgcaacctttggcgcctaccagacctggtaccgcgtcaccggcgacctggccagcggccacactccgctggtgatcatccacggcgggcccggctgcacccacgactacgtcgatgccttcaaagacgtcgccgccagcggccatgcggtggttcactacgaccaactgggcaacggccgctcgactcatctgccggataaagacccgtctttctggacggtcagcctgtttctcgaagagctgaacaacctgctggaccacctgcaaatcagcgacaactacgcgatcctcgggcaatcctggggcggcatgctcggcagcgagcacgcgattttgcaacccaagggcctgcgcgcgttcatccccgccaactcacccacctgcatgcgcacctgggtcagcgaagccaaccgcctgcgtaaactgttgcccgaaggcgtgcatgaaaccctgctcaaatacgaagaaaccggcgactaccaaaaccccgaatacctcgccgcctcgcggattttctacgatcagcatgtgtgccgggtcaacccatggccggaagaagtggcgcgcacctttgcagccgtggacgctgacccgacggtgtaccacgccatgagcggcccgacggaattccatgtcattgggagtttgaaagactggaacgtgattggccgcctggcggcaatcaacgtgccgacgctggtgatctccggccgccacgacgaagccacgccgctggtggtcaagccgttcctggatgagattgccgatgtgagatgggcgctgtttgaagactccagccacatgccccatgtggaagagcgtcaggcgtgcatgggcaccgtggtgaagtttctggatgaggcgtgttcagtaccgcacacgcaactcaaggcgggctaaatccaactgtgggagctggcttgccagctcccacagttgggcagtgatcggcttcagacctcagtggtctcagctttcactgattttttcggcacctcggccaccaacggaatctcttttccttcggcatcaaacaacttgccgccgcggaaataatccccgtcgcgcaacgccgccacatcgtggaagcacaggctgcgctcggtccccgccacaaacaccgactgctggtccgaattaccggctgtgaaatggttgaacgccaggttcagcaggatcgccatgatcgccgacgaactgatccccgagtggaagatggtcgcaaaccaggtcgggaagtgatcataaaaattgggcgcggcgatgggaatcatgccaaaaccgatcgaagtagccacgatgatcaggttcatgttgttgcgataatccaccttggacagcgtgcgaataccgctcgccgccacggtgccgaacagcacgatcccggccccgcccaacacggaagtcggcaccgctgcgatcacccggcccatgaacggcaataagccgagcaccaccaggaacacgccgccggtcgccaccacaaaacggctcttcactccagttaccgccaccaggccgacgttttgggcgaacgcactttgggtgaacgagccgaagatcggcgcgaacatgctcgacagcatgtcagcgcgcaggccattgcccaagcgctttgaatcgaccttggtatcgatgatctcgcccaccgcgaggatgtctgccgaggtttccaccagcgtcaccatgaccacgatgcacatggaaatgatcgccgccacatggaaggtgggcatgccgaaatggaatggcgtggggaagccgaacatggggccttgggccacaccggagaagtcggccatgcccaggaataccgcgatcacggtgccgatcaccatcgccagcaggatcgacaggcgtgaaatggtcgcgctgccgatcttgctcagcagcaacaccagcaccagggtcagcgcggccaaaccgatattcgacatgctgccaaaatccgccgcacggctgttgccgcccatggcccagcgcgccgccacgggcatcagcgtcaagccgatggtagtgatcacgataccggtgaccaacggcgggaagaatttggtgatccgcgagaacaccggcgtgatcaacaaaccgatgaatgacgcggccatcaccgcaccgagtatcgctggcacaccgccagcgccgtcactgccgacaatcgccaccatggttgccacgccggcaaacgatacaccctgcaccagcggcaactggcagccgaaaaacggcaggccgagggtttgcaagagggtcgccaggccaccggcaaacagcgaagcggcgatcaacaggccgatgtccgccggcgacaacccggccgcctggccgacgatcaagggtaccgcgacgatgccgccgtacatggtgagcacatgctgcaggccgtaagccatgttggctgcgacgccgagattctcatcttctggccgctgcggtgacgccttcgggatagtcatggtgagggggttctctgtttttgttgtgcagccactgtatgcaaaggaaagccgggatgtccatagagttgtatacaatcaatttcacaataactgcgacagcggcgttacaaaaaaccattcagccgccctgccccgtggcttgaacccctacgcaaaaggacctgaaaaaaaatgctcaaccgcaagctgcgcattcacgctccggccatctactacttcgacatggtccggcgctgccactcgatccgcgaagctgcgcggcgcctgaacgtggcgtcgtccgcggtgaaccggcaaatcctcaagctggaagacgaactgggcgcgacgctgttcgaccgactccccggcggcctgcgagtaacggcggcaggcgagatcctcacgcgccacatcacgctgttgttgcaggatgtggagcgggtgcgcggtgaactggatggcctgcacggcacacacaccggccatgtggaaatcgccacggtggaaggtgccgccgtcgagttgctgcccgccgcactcaagcgcatgcgccagcgttatccgaaggtgacgataggcgtcacggtgcagggttcgcagtcgattcctggcgcggtgatcaatggccaagcggatttggggctggcgtttgccttgccgcgcagcagcgaaatcagccagttgtgcgtcggccatttccgtttgggtgcgctgatgtcgccagagcatccgttggccggcgaggctcgcgtcagctacgggcagtgttgcgaacacggggtgattcaggccaagagcgagctgtcggtgcatcacctgattgcgccgctgcacaaacgtgcggtggcccacaagccgctgttgcagagcaattccatggaactggcgcgtcagctggcgcgccagcatttgggcatcgccttccagacgcgcatcggcatcgaggcggacctggcgcgcggcgaattgctgcatatcccgttgagtgaccagggcgggatcttcagtgaccttggcgtttacgctcgcaaagaccgcgaactgcccgtagcagtgcaggcccttgcccacctgctgggtgaagaaatcgccctgcgtgagcgggaggaaatgcccgcaacgccccgtatttcctgacttacaagacaagtgccgtgctgccgattcggcatcggcccaggcgagattctgttctttggtgcgcgcaaggcttgtgctgatactgcgcccggcgacccctgcaaggtcgccatgagccaaacgccaaaggaattaaaacaatgaaaaaggcactgcacggcgcaaccgtatttctgtcactgctgggcggcggggaggccgttgcggtggaatggatgaacaacagcgcaggattccgttacggccagcacttcaccaacccgaacaaccccgacgatttcagcaagcgcatctacagcttcacccacgccagcggttatcaatacggcagcaattacctgaacctcgatgtgttcctgtccgacagcagtgacccgcgcaagggcaccgaccatggcggcagcgaggtctatgccgtgtaccggcaccaactgtacgcctcacgggtatttgatgtgccgctcggtagcggcctgatcaaggattacgcgctgaccctggggtttgatgccaaccgcaacaacaacgtcgcctcggcaaaaaagcgcgcactggtgatcggcccaacgttgaagttcaacaccgtcggcgtgctggacctgagcctgatgtactacaaggaaaagaaccacaccggtatccccggcgcacaggagtcgaaccacaccttcgacgacacctacatggtgaacctgacctggatgcgcccgttcgagatcgccaaccacgcggcaaaattccaggggtttatcaattacgtcggggagaaaggcgaggactaccatggccgcgacactgcgcctgaagcgttgatgcggaccgcgttgatggtggcggtgcggccggggaaaagcgtgaagccgaacctgtatctgggggtgggttacgagtactggcacaacaagtttggtgtggatggcggcaggggtacccggacttccacacccacggtgaatatggaaattaccttctaaccgctgcaggaacccaatcaaactgtgggagctggcttgcctgcaatggcattggtgaattcaccatcgctatcgcaggcaagccagctcccacagcttttatcgcatttcaacttgatgcgttcgcgaattccgaatcgcctgcctttggccgcgccagccaataacccaacaccgccagcggcgccgttgcgagcatcacaatcacggtgatcagcagcggctgctcgatcatcgacgacaccaacaggctggcaagaaaacacaggcccaattgcagggtgttttgcagcgccgccgccttgccggagttttctgcaaaaggcatcaacgcattcgccaccacgatggggtaactggcgccgttcaccagggccatcaggcagaacggaatcagcaaggtcgtcagggtcggcaccgtcaacgtggcgacgaggtacagcgccagcatgctgatgcaataggccaccagcaaccacggcagcagggttttgcccgggcagtgctgcaacgcgctgcggcagctgtaaccaccgatcaaaaaggccagcgtcggcagtacataactcaggccgatgtcattcgggctgtagcccatatcgccaagaatgaacggcgaagcggtcagccaggcgaagaaactcgcggagcacgccgcgaagatcatcacattgccggtgaacactcgggagctcagcaactggccataccccaggcgtgcgggttcaccttctgtcgtcaggcgtttcggcacggagcgcaggaacaatgtcggtaacagcaacagcagcgacacaccgagcaacacgccgaagatcgcctgccagccgaagtgattcaacaccatcgcgcccaacagcggcgccagggccggcgacagtgacatcagcggcatgatgctggcgaacacgcggtgcgccttgtcggccgggtaacggtcgatcaccagcgcctgccaactcacggcggcggaacacacgccaatcgcctgcataaagcgcagcgccagcagttgcggtgcggtctcgacccagaacatgcccaggcagcccaacacgaacaggcccaggcctgcgagcaacaccggtttacgccccagccggtcagacaacggcccccacaacaactgccccacggcaaacccggcgaggaagatactcaaactggcgcccaccgcgcccgcgccgatctgcaactgctcgcccatggcgccgaacgccggcaagtacatgtccatggccagataaccgagcatgctcagccccgccaggtacccggtgaaaccaaaagaatttttcattgaagccttgtagaaactgccatcaaactatttgctgactggcgcccattatgaagctgacagttttgctgtgaagcgataataattggacactcatatcaaatattttgaaggcaacagccatgtggtccgaatactccctggatgtcgtggatgccgtcgcgcgtcacggcagcttcagcgccgccgcgcaggaactgcaccgcgtgccctcggccatcagctacacggtgcgtcaaattgaagagtggctggctgttcccctctttgtgcgcaggcatcgcgatgtcgaactgacccctgccggccggctctttatagaagaagcccgtggcgtgatgaaaaaaatgctcggcacccggcgcttgtgccagcaggtggccaatggctggagcggccagctcaaggtcgcggtggactccatcgtcaaaccccagcgctgccgtcagttggtgctggatttttatcggcagtttcccgaagtggagttgttgctggagtacgaggtgtacaacggcgtgtgggatgcgctggccgacgagcgcaccgacatcgtgatcggcgccaccagcgcggtgccggtggccagccgcttcacgtttcgcgacatgggtttgttgaactggctgtgtgtggtcagcgcgaaacatccgctggcgcgggctgatggtttgctcacggacgatcaactgcgcccgttcgcctccctgtgcatgaccgacacgtcgcgcaacctgcccaagcgcgacacctggaccctggataaccagcgaaggttggtggtgcccaactgggcatcggcgattgattgcctgcgcgacggcctgtgcgtcggcatggcgccggcgcaccaggtgttgccgtggatcgagcgtggggaattggtggcattgcagttgagccgaccgtttccggcaagtccgtcgtgtgtggcgtgggcgcaggacaagttttccccggccatgagttggttgctggagtatttgggagatacagagaccatgaaccaggaatggctgaatgggcctgatctctgaatatcacaccgttcaactgtgggagctggcttgcctgcgatcgcggtgtgccagcccatgcatttggcacaggcagttcgctatcgcaggcaagccagctcccacattcaggccatatttcaatccagtaaacgcgtgatggcccgcacgatcatctcgacctccttggccaccagcgtcagcggcggcagcagccggatgatcttgccccgggtcacgttgatcagcagcccatgttccctggccgcgcgttcggccaggtcgcgatacgggctggccagttcaatgccgatcatcaggccctggccgcgaatcgcaacgacctgtgggtgctcatccagctccatgtgcagccgcgccagcaaccgtgcgccctgttgcttggcgttcagcaacaaaccctgctcttcaataatttccagcacggtgcagcccacgcggcaggccagcgggttgccaccgaaggtactgccgtggctgcccggtgtgaacatttgcgcgactgcggcgcgggccaggcaggcgccgatgggcacgccgttgccaaggcctttggccagggtcattacgtcgggcacgatgccttcatgctggaaggcaaaccaggcgccggtacggccgatgccggtctggatttcatcaagcatcatcagccagccgtggcgcgtgcagtgttcacgcaacgctttcagataaccgggcggcgcaggcagcacgccgctttcgccctgaatcggctccagcaagacggcggtgatgcgcgggccgaactgctcggtgatggcctccagcgcagccagatcaccaaagcgtactttgacaaaatccccgggcaagcgctgaaaacccaagcgtactgacggtccgtcactcgccgccatggtgccgagggtgcgcccatgaaaggcgttttccatcaccaccaccaagggttcttcgatgccctttttccagccatgtaaccgcgccagtttcagtgcggtttcgttggcttccgcaccggagttattgaagaacgcacggtccaggcctgacagccgggccaagcgctgcgccagccggtgttgccaatcaatgttgtaaaggttggaggtgtgcagcagcagccccgcctgctcgcggatggccgtcaccagtttgggatgggagtggccgacattggtcaccgccacaccggccaccgcgtccaggtattcacggccttgctggtcccacaggcgcgtgcccaggccgtgcgtaaagctcagggccgagggttgataagtggtcatcaggcaggcggcagtcatggcggcaaactccagtgcatcgttgtgatgggtgcagtatcgttaaccactccagctggataaactgcgctttcctgcaatgactttgaatcagggcttgataatggatctgttccaggcaatgacggtttacgtgaaagtcgtggaggccggcagcatgaccgccgccgcgcaggaatgcgggatgtctaccaccatggtcggcaaccacctgcgtgccctggagcaacggttgggggtcagcctgctcaagcgcaccacacgcaaacaaagcctgacggagtttggcaggcagtattatcagcgttgcctggaagtgctggggctggtggcagactccgagttgctggcggaacagacccacggcgaaaccccgagaggcaccctgcgcatcaccgccccccccgtgttcggcaccgaacgcctggtgccggccttgagcgaattttcccggcgctacccgctgatcaacctctacgtggtgctgagtaacgagcggatggacttggtcgacagcgatttcgacgtggcgatccgtctcggcgatctggaaagctccagcctgattgcccggcccatgcagccctacaccctgaccctctgtgcgtcaccggaatacctggcgcggcgcggcacgccgctgacacccgcagaccttcagcagcacgactgcctggcgttcgcctacccggcgaacgacaactggcgcgataccgacaaactatggcgcatgaccggcgatgccggcgaggtggaagtcgcggtgtccggctcattgaccatcaacagctcgcaaggcttgcgccaggcggccgtcaacggcatgggcatcatcatgctggccgatgccctggtacaaccagacctggaaagcggcaagctggtggccttgctgaccacctacaaactgcccagccgccccatgcacctgctgtatcgccaggaccgctaccgcctgcccaaactgcgcgcgtttgtcgactttgtgatggagcagtgggcgctttaaaacgccacacccaactcacgcaggcgcgcggcggtgcgctcggctgacacgtggtgaatgccctgccagccaagggccacggccgcgtcgatattgccggccacatcatcgataaatacgacttcagcgggctggatatccggcagatgagcgcggacctggccgaggctggcgtggtagatggccgggtccggcttgatcagcttcagctcaccggaaaccacgatgtcgcgaaaatgctgcaagaagggatagttggcgcgtgcataggggaaggtttcggctgaccagttggtgaggccgaacaacggcacatcggcatcatgcaatgcctccaggatcgccacaccttcgggtagcgggccacgcagcatttcgtgccagcggtcgtagtaagactggatcagggtttcatgctgggggtattgggcaatcaggctgcgagtaccgtcggccagcgtgcggccggcgtcctgctcggtgttccaggcttgggtgcagacggtgtcgagaaagtgttgccgctcgtgatcgtcagcaatcagcttgcggtagaggtgctgcgggctccagtcgaacagaacaccgccgaaatcaaaaactactgcacgaatcgtcatcagatcctccgttagtgtggcttgatagccgaaggagtctggcagattgtgagcaaaggcgggagcgtgcggttgtaacaccaaacaaatgtgggagccggcttgcctgcgatgcagtcacctcggtgtatcagttgcaccgcggcgatgctatcgcaggcaagccagctcccacacaagccggctgccacattctttgactgtgttttaggcctgaatcaagccattgatcttcacagtcgggtttacgtcagcttcgtaatcaacgccgtcgatttcaaagccgaacaagcgcaggaactccgccttgtaaccggcaaaatcgctgatctcgttgacgttgtcgtcggtcacctggttccacagggcagcaacggcgtcctgaaccttcggctccagctcggccaggtcggcgcgcaggcggccgtcggcgtccagcttcggcgtttggccatacaggctgtccttgaacaggccgtagacctgctcgatgcagccttcgtgagtgccctgctctttcatcactttgaacagcagcgacaggtacagcggcatgatcggaatcgccgagctcgcctgagtcaccacggccttgagtaccgacacacgggcgtcgcccttcagtgcggcgaggttgtcgcgcagggtcaggactttcttgtccaggtctttcttggcttcgccgatggagccgttccagtagatgtcctgggtcagcttttcaccgaggtaggtgaacgcggtggtcttggcgccttcggccagtacatcggcgtcacgcagggcgtcgatccacagctgccagtcttcgccgcccatcactttgacggtaccgtcgatttcttcctgggtggctggctcaagggtggtgtcgaccacaacgcctttgtcggtgttgataccgcgcagggtcacggccttgccgattggcttgagggtagagttatgcaccacgccttgcgggtcggtacggcgtggcgcggccaggctgtagaccaccaggtcgatcttgcccaggtctttcttgatggtttcgatggtcaggcgcttgatctcgtcggagaacgcgtcgccgttgatgctcttggcgtacaggcctttttcaacggcaaacttctcgaacgccgcgctgttgtaccagccggcggagctcagcttgccttcttcgccttctttctcaaaaaacacgcccagggtgtcggcaccgcagccaaacgcagcactgatgcgcgcggccaggccgtaaccggtggaagcgccgaggaccagcaccttctttgggccgccttcgatggcgccgtgttgggtgacgtagtcgatctgttccttgacgttcgcttcacagccaacagggtgagcggtcacacagataaagccacgaacccgcggtttgatgatcataaaatttctgcctcttccaaggggtcgacggccagtggtggccattcaacttcattcgtaccggtctatgacgccggaaaaaccgaagcgtcacgatagtcgcaaatcttccgtttacaaaatccaatccacaaaacggccaagtggccgcaggcgcgggttaaagcctgtagctgaccttcacaaatttgcactattaaaaacgcccggcatcgctataacccactatcatggcagcaatgtttcactatgtttcaggtccggagcctcgtttcatgagtaatagtgctgttcgcaagaagctgatctcggccgcctgggtgctcggggtattgctgttcatctactgcttcccgcgcacgaccctggtgtttttgctgctggtggtggtgtgtggcgtttacgacttcctgcgtaacggcctgtacgaccgtgacacgatcaagaaatactttatcggcaacggccgcaacacctggatcctggcgccgttcaacacattgttcgacctggtgagcagccgtaaccgccacgtctataccatgcgcgacctgccgcccgcctggcgtgaagacctgcaacaggtgatcgacgacgccatggcgcaaaaggacgaaatcatcagctacctggacgagcgcatggccgagaagaagcgcggcatgttgttcttccagtggtatggccgcccgatcgaaaccaccctcgacatcccgcaactgcgcaaaaagctgccatttgtgaagaccatcggcgtctcggtgttcaacgaaaaccgctccacttccttccacttcggcccgctgcgcatgatgttccgcgtgctgtacaacatggcaccggcaccgcaccacgaaggcgtgtacatccaggtgggcaagcacaagcactactggcacgacgacccgctgtttatcttcgatgacacgctgatgcacgcgtctttcaacaaaaacgacgccaaacgttactgcctgttcatcgacatcgtgcgcccgaccccgctgccgggtgtactcaacgcggtgatctcgggctttgccgggctggtgtacaccctgcgtcgggttttctacaaaaactggaagctgattcagtaagttctgcggcatgatggtgctggacggtgtttgcgccctgcccgcttggcggccaaactaactgtctcgtgcgaccggattcggcgctcaccattttcaagccatcgccgcccctggcgggtgcgatggctgtgctttcaaggaaccagaatgccgcaacgtcaagtcatcaatgcctccgtcagccccaagggcagcctcgaaaccctgtcccagcgtgaagtccagcaactgagtgaagccggttccggcagcatctacaccctgttccgccaatgcgccctggccatcctcaacaccggcgcgcacatcgacaacgccaagaccatcctcgacgcctataaagactttgaagtgcgtatccaccagcaggatcgtggcgtgcgcctggagttgctgaatgctcccgccgacgcattcgtcgatggcgaaatgatcgccagcacccgcgaaatgctgttcagcgccctgcgcgacatcgtctacaccgaaaacgagctggacagccagcgcatcgacctgagcaactcccagggcatcaccgactacgtgttccacctgctgcgcaatgcccgcacgctgcgcccgggtgtggagccgaaaatcgtggtgtgctggggcgggcactcgatcaataccgaagaatacaaatacaccaagaaggtcggccacgaactgggcttgcgcagcctcgacgtgtgcaccggttgcggccccggcgtgatgaaagggccgatgaaaggcgcgaccatttcccacgccaagcaacgcatcaccggcggccgctacctgggcctgaccgagccgggcatcatcgccgccgaagcgccaaaccccatcgtcaacgagctggtgattctgccggacatcgaaaaacgcctggaagcctttgtgcgcgtcggccacggcatcatcatcttcccgggcggcgccggtacggcggaagagtttctgtacctgttgggcattctgatgcacccggacaaccgcgacgtgccgttcccggtcatccttaccgggccgaaacaggccgcgccgtacctgcaacagttgcacgcgttcgttggcgccaccctgggtgaagcagcccaggcgcactaccagatcatcatcgacgacccggctgaagtggcgcgccagatgacggccgggctcaaggccgtgaagcagttccgccgcgagcgcaacgacgcgttccatttcaactggttgctgaagatcgacgaaggcttccagcgcccgttcgacccgacccacgaaaacatggccagcctgcaactgagccacgccctgccggcccacgagctggcggccaacctgcgccgtgcgttctccgggattgtggcgggcaacgtcaaggacaaaggcattcgtttgatcgagcagcatggcccgtatgaaattcacggcgacccggcgatcatgaaaccgctggacgagctgctacaggccttcgtcgcccagcaccgcatgaagttgccgggcggcgcggcctatgtgccgtgctaccgagtggtgcaataactagcgttgcaccgccacgcatttgatttccacgagcaagccggggtgcgccagctctgacaccccgatggtcgtccaggcgcaatgcccgcgtgggaacaggcggtttttcacttcacgaaaaaccgccatgtgttggctcatgttcacgtggtaggtggtcatgtccaccacgtcgtcaaaactgcaaccaccctcctccaatacctcccgcaggttctcccaggcggcgatgaactgcgcctcggggtcttcgatgaccgccaactgtggtgtgcgcccgacctgcccggcgcagtagagggtcttgccgactttgacggcaggcacgtagccggcgcgttcgacaataggttgcatggcgggcgggatgatgaggtggcggtcggtcatatgcggtatctctttgtcgtcgttttcaagcgtgttgaggggaagagtcgggctatggttttaccaacagccgcgactcattgcatccacaaaaaacctcagggaatcttgatcagtgaaagaccatcacctaccgaaagagaacaaccggccgattaatatcgcgcacagcagaaccgcagacctgagtgttatggcgctcaaaggcttgattaaacgacctgaaacctcagtcagcctccgacagatgacgcaagcctgcgccgacgctgcatcgaaagcagattaagcgggctggcactctatttcccgattcgcgtaacctttaggcctctcacgtcatctgcgtgaacgccgatcaacctccgggaaatcaacgtgcgaacagccctgaccctttgcctgacattggtaccgaccttggcactggccgacgccatcgtctggcccgacctgccgaaaacctgcttcgtcagcggccgccccgccaccagccaggatatcgacaccggctgcgcggcgtttttgatcaatgtgcaaggcaagccggcgggaaagccgatcaacgtggatgttccgcagtacgcgctgcacgtcgatgaggccaccggcaaggaaacgccggtgatcatcattcaagcggaagggaacggtgcgacagaagtggtgggctatcaggagctgggcagcgatcagctcggtgccgcgctgctgcgggaggttcggctactgggtacccagaagccgatctaggcttcagcgaacccagccaccaccctgccagtggtaaccgtcattgcgctgcacccaatgcgggtgcacgtaacggtagccttcacgcaccgcttcccaatggccatgcaccgccacgtaacgcccgccttcccaacgccagtaaccgcgcgaccatacatagccgtaacgcgcagcgggttcgacttcgatcacctgcaccggcggtggttgcggcgcgacgacttccacatattcacgctgcaccggcccgcgctcatgcaccacacgctcttgcacacacccggatgccgcgacgactaccgccgccattgccgcataacgtagcaacataccaaaccctcgggcgtcagcgcccaacaaatacaccagtaaaaaatgcccccttgtctcagcctcgctcctgctcggctctgggttctttttaacaggtgctgactgtccggttgctgaacccacaaggctcaggacgcacagacgacggccggtcgcttcaggcgcaccagcagcagccccgcgacaacgacagcaatcccggcataagtcgacgcatgaatcacatcgccaaacatgagcgccgcccacaccagcgtgaccggcggctccagatagaccagcgcagccacgtgagtcgcggtcattacacgcagcaacatccacaggctcaagtaggcgacaagggtggacaacaccgtcagccagacaatcgagatcagcacgtctggcgcacggggaatgctcagggtaccggtgtaaagcaccgcgccggtgaacccgatcaaggtcagcagtgactggatgaacaacggcaacaccaggccaccgccctcgggttgcacggtgcggcgctcatacaaggtcgccagcgtcagccccaatgccgccgccagcggcagacagtacatgaccaggccgacccgttgcccgctgctgtactggccggcgatcaccaccgccacgccgacaaaactgatcatcagccccgcccactgccagccaccgctgcgctcggttgcgctgcccgtggacagggccgccgtcatcagcggttgcagcgctgcaatgatcgccgcgatgccagggggcaagccgttctggatcgccacatacaggcagctcaagtataaaaactgcgaaagaaaaccgaccaccgcgtagtggcgcacctgcgcccacgtcacctggagcaacctgacattcaagtaaacacccaggcacaccaccaccaacagaaaccgccagaacagcaggttgaacgcccctgcgtcctgcgtgcccagcttggcgccgatgtagcctgaactccacgacagcacaaatgcaccttgcagcaaaaaccgccccagggtcgatcgcttcatgccgcctcccgtctgtgtaaattgacgccaaggctaggggccgcgcatgcttctgtatatttgaataatcggcagcactaatccgtaaaagtggaatcatggccaaacaactgaatatcgacctgttgcgaaccttccacgcggtggcgcgctttcagcgtttcaatgaagcggccgaacacgtgcaccgcagtgcctccaccgtcaccacgcagattcaaaagctggaagaacagatcggccagcgcctgttcagccgcaataatcaaggcgtggagctgacgccgtacggcaggaaactgctgggtgaaaccactgagtttctcaaaagccatgaccgcctgctgatctcgctgatgccccagcgcatgcagggcaagatccgcctgggcgtgccggacacctatgcgccggcctttatccaggcatttttgcctcggttgattgctgacaacccactgctggaactggaagtcgaagcccgcaccagcggccaattgctgaacctgttcacggccaaccatctggacctgaccatcatcgtcagcgcccagccgctggctcagggtgaacgcctgggcgccgtgcaacccctgtgggtggcagccgaacacttcgactacccgtctaacgcgccgctgcccgtcaccgtgcccattgtcggttgcccgtatcgcgcagcggccctgcaggcgctgaaggatcacgggatttaccatcgactgctgctggaaagccccaattcatccgccgtcgaagcctgcgtgcgcagtggtgtggccgtggggttgatggagccaagccgcatgggcgaagggctcaagcatctgccggacctgccggctttgcccgcgcagcatctgtatttgctgtgcgataccggcaacgcactggccctgcacctgcacgagcaaatccggcacttcaaggtctgaatgccgggcacaaaaaagcccgctgaccgttaccggttcagcgggcttttcacatcaggcttggcttacagcgccaggtcagatgccggcttgctcggctcagccgcaggcttggcagcctcggtggcctgaggcgccgccagttgcggaatggctggcggtggcgtcagttgcaggacgccagcggtgtaggcccattccttggcaacggcttccgggctgtcgttcagcttggtgccgtagctcggtacgatctggtgcagtttggcctgccactcaggggtcgcgaccttgtctttgaagatcttctgcagcacggtcagcatgatcggagccgcggtggacgcgcctggcgatgcacccaacaggccggcgatggagttgtcggcggagctgaccacttcagtgccgagtttcaggacgccgcccagttcctcgtcacgcttgatgatctgcacgcgctgaccggcttgccacaggcgccagtcttctttcttggcgttcgggaagtactctttcagggcgttgtagcggtcgtcatccgacagcatcagttggccagcaaggtactcgaccagcgggtattcacgcacgccaacacgggtcatcggccagatgttgtgggtggtggtgctggtcagcaggtccaggtacgagccttctttcaggaacttggtcgagaaagtcgcgaatgggccaaacaggatcacgcgcttgccatccagcacgcgggtgtccaggtgcggaaccgacatcggcggggcgcctaccgaagctttaccgtaggccttggccaggtgctgctcggcgatggccgggttatcggtgaccaggaacgaaccaccgaccgggaaggccgcgtagtccttggcttccggaatgcccgacttctgcagcaggtgcagtgcaccgccgccggcgccgatgaacacgaacttggcgtcggtttcagtcttggtgccgtctttcaggtttttgtagctcacacgccacgaaccgtcggcgttacgggtgatgtcctgcacttcgctcgacagtttcaggtcgaaattcggcgtggtttgcaggtgagcgacgaactggcgggtgatctcgccgaagttcacgtcggtgccgatcggggtccaggtggccgcgattttctggttcgggtcacgcccttccatcatcagcggaacccacttcttgatcacagccgggtcttcggagtactgcatgccggcgaacagcgggctcgcttgcagggcttcatagcgttttttcaggaacttgatgttgtcatcgccccacacaaagctcatgtgcggtgtggagttgatgaacgaacgcgggttcttcagcacgccctgctggacctgccaggaccagaactgacgggagatctggaacgcttcgttgatctcgaccgctttcgggatctcaacgttgccgttcttgtcttccggggtgtagttcagctcagccagggccgagtgaccggtaccggcgttgttccagccgttggagctttcttcggccacgccatcaaggcgctcgaccatctccatcgaccagtccggctgcagctcgttgagccatacacccagggttgcactcatgatgccgccgccgatcagcagcacatcgactttctttgcctcttccgcgtgaacggacgtgatccccatcgacaaagccagccccagcagggcagtgtttacttttttaaacatcagtagcacctatgataaaacgccatccgccccaccgcccgattcctcaaggccgcagggtgggcacacaaggccgacgagtcgacctcactgtttttgtcccttctgcgctgacttcttatcattattggcttcagctacctgggcgacagccaaccaccgggacgtatacgggtgtacgcaccggagaaagactagaccaagacggcgcgcagaatatcacgctgaacaacgtttatgcgtcgtttggccaattgacagctctaaaacgggacttttccgagccagtgtcaagcctgacaggcgcgacctggggtcacagggccggaactctcgggtaaaaggctgttctagacaccttcgccaccgcttgcgtagcatcggcagctgtccttcgtgcaaccccctcacacagagttacccatgactatccagcaaacacccgggcctgtgctgcccgcgcgcagcgccgccaaaatggaagctgccatggccgtgggcgccttcgcgatcggtaccggcgagttcgccatcatgggcctgatgcccgagatcgcgcacaatttgaacttgagtgagccgcaagtcggccacgccatcagcgcctacgccctgggcgtgatggtcggcgcgccgctgctggccatccttggcgccaagctgctgcgcaaacacatgctgctgtggctgatgggcctgtatgccctcggcaacttcgccaccgccttcaccccgagcttcggttcgctggtggccttccgctttatcagcggcctgccccacggcgcctacttcggcatcgccgccgtcgtcgcctcgagcatggtgccgggcgacaaacgcgccggcgccgtggcccgcgtgatgatgggcctgaccctggccatgctgcttggcaaccccatcgccaccttcctcggccagtacttcggctggcgttcggcgtttgccctggtcagcgtgatcgccctgtgcaccatcgccttggtctggcaattcgtgccccaccgccacgacgaacaacgcagcgacccgcgcaaagaactgcgcgccttcaccaaaccccaggtgtggatggccctgtccatcggcgccatcggttttgccgggatgttctgcgtgttcagctacttggcgccgaccatgctcgaagtgaccaaagtctcaccgcagtggatcccggccggcctcgccgcgttcggcgcgggcgccatcatcggcaacatcgccggcggcaagctgttcgaccgcctgcaatttcgcgccgtgggctggattctggtgtggtcgatggccgtgctgctgttcttcaccttcgccgccagctcgctgtggggcgtactgctcggcatcgccctggtcggcaccatgatctccatggccgcaccgctgcaaatccgcctgatggacatcgcccacgaagccccgagcctggcggcggcgtccaaccacgccgcgtttaacctggccaatgcgctgggcccgtggctgggcggcatggcgatcaccgccgggttgggctggaccagcaccggctacatcggcgccgctaccgcgctgatcgggctgggcctctttctgatcgcaaggcgcatgaaaggcgggcactgatggaataaacacgggccctgaagcgttttgttgattcaacaaccacaaatcaacgaagggccccatggacatcacactccccctgctcagcattctcggcgccatcgccatcggcgccgccagcccaggccccagcttcgtcttcgtcacccgcaccgccatcgccctgtcgcgccgcgacgcactcgccgcggccatgggcatgggcgtcggtggcgtggtgtacggcggcctcggcctgttcggcctgcaaaccctgctggccaaggttgaatggctgtacgtgatcctgaaaatactcggcggcgcctacctcgtctggctggccgtgcaactgtggcgctcggcgaaaagccccatcgtcgtccccaccaccgccgacggccgcccacaaagcgcgcgcaaatccttcacactcgcggccgtgacgcaactgagcaacccaaaagcggcgattgtgtacggcagtattttcgcggcgttcttgccggcgcacgccccggtctggacattcgccgtgttgctgccggcaatctttgcgattgaggccggttggtacaccgtagtggcgctggcgttctcgtcggaacggcctcgcgcggcatacctgcggtcaaagcactggtttgaccgcacggcaggcctggtaatgggcgccctgggcctgcggctgatcctcggctcagcccacgtccaagcctaaatatcggggtttcagccccccacctgtggtgagcgggcttgccccgcgctgggctgcgcagcagccctaaccctcatcaatcatcatgcatcaaccccgacccatactccccaaaactgctccccaacccactcccgccaccaaaactcatcttggccgccttgttcgggctgtgatccccaaacgcctgacacccctgagcaaaacaagggtcactgctcacggctgacgaagacgaacagccgctcaacagcacagcaccggcaatcatcaccactttgacgagattcgagatcatgttttcaactccctatggactgggggcgcgggggtcccctcttgagagtgatcgtaggcctcaaatgggcgagggatgatgaaactttgcaggggggacaggacgggttcaggttgccgccttggggtaaggcggcggggctggatgtcaggccgtggctaatggcgcgactcgctcctgggctccgccgacgaacagagagcccaagccgatcagttgctagatgcgcaagacgatagcgcgatggggttcttcgaggtcgaacgccagggtggcggccaattgcttagcggaggcgtggttttcggaggcgttggccagcagggtgctgatactagagggtgtcgattggttggtcgacggtggctacgtcatcgtacgacgataaataacgatgaaccgctcgttgagacgccgtctgtaatttggcaaagacgggcgcagtgttgtgatcagtataaaagcaacgtgttttgttagacacgaggcaagcctcaaatttttccgagagcttattaaccttagcactacggattctctccggccacaaggtttgaagcggcttaaaaaggcgagttgagtggccaaatggcctcctagaaaacacagaaaaatttcaaccctatcgcaatacgacaataatatcattatgataccatggcgatatacacagttaccgccctactattacaaatggaattcaggccactgaaatgaatggatgccctctccctacaagctcagctccttcgtccgtaaaaaaacctattttaacgagcgaaatcacatgctcaaccccaaactcttacaactcttccaacaactttcaacttaacgacgacaacaagcaaaataccaccaacaaagatcaaagtatccatattaacattggagacctgccgcgacttgaaaaaccaatcgcgacagagacacaaatactggtagcgacggcaaaaaatggaatcaaagttgagaccgatactgactggcctgctgttggcgccacctttattgtaggtatcaccatcgcttggttagcagccacgacccagcgaagccagatccgttccaatgtcgccaatttcagacatgactggcttaacaacttacgatctaaaatatcagaactcattgcaaaactgtcattactgcactcaaaacttagctcagataaaaactttcttataagccctgcttcagacgaactctatagtgaaattattttcctacaaactaccatagagcttatgcttgatagaaaaaaagaattacacaatgaactaacacgaactatagaagaaattataaaaacattaaagcgcgcaatgaacaacgacaaaatcaatgagctagcgaataaaatctccgtaaatgccagtgaggtactagagcaggcatggatagatatctgcctagatcacggattaaaaaagaaggaaaaatttggctttctcaatttcctccggcgcaactagcaccgcaaaccaacgagttaaactcgaatcgttccaaacacaattaatgtgtggaagtaaatcccaacaagaatagcgcagaatgcaggaaattaaaaatggcaacaccaagagtttttatcagttcaacttgttacgaccttgccgacgagcgcgacggcatggtttcattttgcaaaagctttgggttcgatagcgcacttagtgagcgtggagacgttttttatcatcccgatctacacacgcacaatgcctgcataagagagacaagccattgtcaaatgtttattttgctaattgggggcaggtttggagggaaacatataacagacaaagctaagtctataacaaatgcagaatacattgccgccagagaccaaggcataccgatctttacctttatcaaacaagatgtacttaacgaccataacgtttggcaacgtaataaggatcagtctttcatagcaaatattagatttccttcaatcgacaagcaagagcatgcaatcgacatatttaacttcatcgaccaagttagacaagccccgaacaacaatggattttttggcttcaacctaaacaaagaaatatttgaccacctaagaaaacagtggtctggaatgttttttgactacttacaaaaccgatcattatcaaaacaattttcaacaacaaatcaaacccttgcagcactaactgccgcctcagaaaaaattgaagaaattgttaaggggatttatcagaatgttgaaggagcaggcgcaaaagacgctttggacacaatggacctcgaaggagaggctagagagttatttgtgacactgggaaacaaaatggatgatcgatattatctttcaccacacggaattgacaaagcaatcagcaacccaccagagaaatggcaccaattacttgttgatcacgcttttctctgcaccatcgaagagtctttagaggatgacggaagcagtggtctcgtccttgagtaccttggatcggcagtatataaaatatcaggcaacctaaacaaatcccagcgagctgaacttgaggtgcttcaggcacagtatgatgcgtaccgtaaactcacgatcacctcaagaaaaaaaataatagaacctcatatctacacaggcatcagtgacgcagaagagtagcctcctattgatcgaagttgtctgccgcagcagtagacaacttcatcaactcaaagggaagggggcataatatctaagtgatcaccgtcagcctgaaacatttaaaggaaacaacattcgcatcccgccaagcatcgcgccgaacaatgctgataaactgctctcttcgccctacccctgatctagaatcccaatgcatctacaatccaactctctctcccgccgcttctccatcgcccccatgatggattggaccgaccgccactgccgctacttcctgcgcctgctctccaaacacgccctgctctacaccgagatggtcaccaccggcgcgatcctccacggcgaccacgagcgtttcctgcgccacaacgaagccgagcacccgctggcgttgcaattgggcggcagtgtccccgccgacctggccgcgtgcgcacgcatggctgaggcggccggttatgacgaagtgaacctgaacgtcggctgccccagcgaccgggtgcagaacaatatgatcggcgcgatcttgatggcgcacccggcgttggtagccgaatgcgtgaaggcgatgcgggatgcggtgtcgatcccggtgacggtgaagcatcgtatcgggatcaatgggcgggacagttgtgccgagctgtgtgattttgtcgggacggtgagggatgcgggctgcaccagttttaccgtgcatgcgcggattgcgattctggaggggttgtcgccgaaggagaatcgagacattccgccgttgcgttatgacgtggcggcgcagttgaagcgggattttcctgagcttgagttcattctcaacggcgggatcaagacgcttgagcagtgccaggaacatttgcagacgtttgatggggtgatgctgggccgggaggcttatcacaacccgtatttgctggccgaggtggatcagcagttgtttggcagcgaggcgccggtgatcagccgggccgaggcgttggcgcagttgcggccttatatcgccgagcatttggccagtggcgggacgatgcatcacatcacgcggcatgtgctggggctgggcaccggtttcccgggggcgcgcaagtttcggcagttgttgtcggtggatattcacaaggccagtgatccgctggcgctgctggatcaggccggggcgttgctggaaggtcgctgatcggcctcagttgaccgccttaaggcaggcaatcagggtttcgataaaccgctgcaacgagggtggcagtgtacgtttgggcatggtcaggacttgaatggtgcggtcggcaaaccgggggttggtcagcggcaccgagaccagctcatcactgccattgacccgctggctgatggcgccgcccagcgcgatggtgtcggtgtggcggacgaactcgtggatggccccggagtagttgcaggtcatgacgtggttgaaggccagcccctccatttcgcacaccagatcgaacagctgccgctgggtcgtgcccttgggggtaagcgccaaggggaacggcgcgagcgcgttcagcggcaattgcttgtgcgccgccaacggatggccggcgcgcatgatcgcgcgaatcgccgagcggcctgaatagagaatctcgacaccgtcggtgggttctgtgctgaacgtcagccccacgtcggcatctccgcgtttgattttctctgcgcattcgaacggtgacatcacttccaacacgtactggaagtcagggtgttggtgataatgctggatcaatacgttcggcaaaaaataccgcgagagcccttctgtggacaccaggcgaatgacccgtgcaccgggataatcaccgccgcgcaattccgacagcaaggcctgttcttccagcgaggcgcgcctggcgtggtgggccaatgcgctgcccgccgccgtcggttccatgccccgtggccgacgctcgaacagggctacgccgatactctcctccagcaaagctatttggcggctgaccgcgctgggtgcgatgtgcaagcgctcaccggcggcagccagcgaacctgaatcaaacaccgccagaaaataacgatagtccatgggttttgtgctcataaaggcttctattaattagatgtcagccttgaaaaaacagcaatatacagtgcgatgggtgacttctatattggcctgaatctgtcagccctaatcggaatggtcatgtctaagcaacaagcactcgccagtgttcgccaccacttcgccgacggccatttcgaagccgacttgcgtcgccgggtcgctatccgcagtgaaagccaggcccctggccaggcgccggaattgacgcgctatctgcaagaggaaatacaaccggcgctggagcggatgggctttgaatgccagcccttggaaaacccaaaaggtgccggcccactgttgttcgcgtcgcgtcacgaaggtgcggacctgccgacggtgctgacctacgggcacggtgacgttgtactcggttacgccgaacaatggcgtgaaggcctcgacccctggatgctgacggtggaaggcgaccgttggtacgggcgcggcaccgccgacaacaaaggccagcacagcattaacctggcggcgctggaggcagtgatcgaggcccgcggggggcgcttggggtttaacgtcaaggtgctgttcgagaccggcgaagaatgtggctcgcccggattgcgtgaggcctgcaccgagcatcggcagttgctgcaagccgatgtatttatcgcgtcggacggcccgcgcttgagtgataaccgcccgacgatttttctcggttctcgtggctcggcgctgttttcccttgaggtgcaggcgcgcgacaagggtttgcactctggaaactggggcggcgtgatgtccaacccggccgtggtgctggccaatgcactggccagtctggtggatcagaacggccgtattctgtgccgggggctggtgccctcgtccattcccgactccgtgcgtgaggccatccgcaacctgggcatccatcaacactccctcggccgcgccctggacgttgactggggcgagccgggcctcaccctgggggaacgactgtttgcgtggaacaccctggaaatcctcgcgttcacggcgggcaacccggccaaaccggtgaatgccattcccccgtcggcagtcgcccattgccaattgcgctttgtggtcggcacggactggaagcacctggaaccgctgctgcgccagcatctagatgctgcgggcttccatggcgtcaacatcgtgatggaccgttgcacacccagcactcggctggaccctgacaacccatgggtcagcttcgcgaaaaaggttatcagcgacaccacaccgaggcagctcgcggtattacctaaccttgccggtacgctgcccaacgatattttcgcggatgtgctggggctgccaactttgtggattccacactcctaccccggctgctcgcaacatgcgcccgacgaacatctgctcggttcagtggtgctggaaggcctgcaaatcatgaccgcgctcttctgggaactgggcgatgcggcgcaaacccacgcctgaaaaaacagggccttgatccactttttatctgccgctcacacacttacaaaaacccggagcgtcgaacatgacagcgttgtcgtccacccccgttacacctgccgccgagcaggcccagcccttatggaaaccggtcggcgctgccttgatcggcaacacccttgaatggtttgacctgtcggtttacgcctactttgcgttaaccatcagcaaggtatttttccccgcagcagacccggcagtctcgctgtttctggcgttcgcgacgttcggcatttcgtttctgattcgtccgctgggtgctgcggtgctgggctcttatgccgaccggcaaggccgcaagaaagccttgagcctgtccattttgctgatgctgatcggtacggcgatgatcgcggtgatgcccgcctatgctgccatcggggtcatcgcccccatcggcattctgtttgcgcgtttgctgcaaggcttctccgctggtggtgagttcggcagttcaaccgcgttcatgatggaacacgccccgcaaaagacccgcaactttgtcgcgagcctgcaatttgcgagtcagggctttggcgtggtgatcgcctcgttgttcggctatttcctgacgactaacctggatgatcaacagatgctcgcgtggggttggcgggtgccgtttttctttggtttgattctgggccccgtggggctgtatatccgccgtacggtggatgagtcgcctgacttcaaggagagcgagccgggttcgcagccgttgagggaggtgcttctttcccagaagacattgctgttggtggccatgggcgtgctgattgtgtcgacagcctccaacttcatgatgaagtacatgccgtcctatgcctcaaccacgctgaatattccacagtcttcgggctttctggcaacgctgaccggtggcctgatcctgaccctggtgacgcccattgtcggtttcattgccgggttcgtcagccgtatcaagatcatgctctgggcgtcgatcatctacatcctgagtatttttccggcgttcgtctggctgaacaaagtacccagtgccacgtcgttattgctcgttgtgtcgatgatggcgttgatcaaggctgtttacttcgcaccgctggcctcactgatggcggatgtgtttcccattcggacccgggtgacgggcatgtcgctgagctacaacctgtcggtgaccatcttcggtggctttgcgcccgtgattgccacggggctgattgcgttgaccggatcgcagctggcgcccagtttttatctgattctggcggcggcgcttagtatcagtgccttgtgggtggccaagcgtaagctgaagctggcgtaactcaaccgctgtgattgcggcggtgatgctgccggcgctatcgcaggcaagccagctcccacaggctgggtggcagttgggttgaacctgctggccgaattggcctcctattgtgcaggtaggccggtgtttcaaacggctgttttcaggatgttgccctcgcaaacgatcgaacgcatttgcgcccttgagcgcccgtcggcgctcgggtaatgtcatcagacccacaggacagagcacgcccatgacttccaagctggaacaactcaagcaattcaccaccgtcgtagccgataccggcgatttttccaccctcgccaagctcaagccacaagacgccaccaccaacccatccctgctgctcaaggccgcgtcgatttcggcgtatgcacctttgctggatgcggccgtgaaggactgtaacggcgatgtaggcctggccagcgaccgttttgcagtggcggtaggccaagagattcttaaagtcgtgccgggccgtatttccaccgaagtggatgcccgcctgtcgttcgacgaagcggccattctcaagcgcgcgcaccgcctgatcgacctgtacgacaaagccggcgtaggccgtgaccgcgtgctgatcaagatcgcctccacctgggaaggcatccgcgcagcggagaagctggaaaaagaaggcatccagaccaacctgaccctgctgttctcgtttgcccaggcggtggcttgcgctgaagccggcgtattcctgatttcgccgttcgtgggccgtatctacgactggtacaaaaaggccaacggcaacgactacaccggttccgatgacccgggcgtgcagtcggtgacgcgcatctacaactactacaaggccaacggctacaagacggtcgtgatgggtgcgagcttccgtaacctgagccagatcgaagagctggccgggtgcgatcgcctgaccatcagcccggacctgctggagaaactggcggccgatgaaggcaagctggagcgcaagctggcgccaggccacgccggtgaagcgcgggtgcatttgactgaagcgcagttccgctgggagtccaacgaggacgcgatggcgaccgagaagctggcggaggggattcgtcagtttgcccgcgaccaggagaagctggaggcgctgttgactgccaagttgtaaggcaggcagcggcaaaaagggcggcaccctcgcgggtgccgcccttttttgtggtggctgatctcaagccagtcaccattgaaagtgtgggagctggcttgcctgcgatagcggtgtgtcagccacctgttcattactggcccaccgctatcgcaggcaagccagctcccacattcgactgggttccaataattgagagatcagtggcgctcgagggcattcacgaggtcgtgaaacgcttcgcggttggactcgttcaagcccatcaggatcttgtgcgcttccagcaccttgacccgcacgacttcttcggactggtcctgggaaggcaggtcggtcaggcattccgggcacggaatcgggcgatcaacgatgttgaacacctgatcgaagcccatggactgcagcagacgggtgatgtcttcgtgggtggtgacgacggtcggcaacaggccgaccttctgccgagacagaatggacaacttggccagcaagccaagggtggtgctatcgatgctgcgggtttcggtcagatcgatcacgatcgccgagaagttcagcgctgtgaagatccgctcaatcgtcgcatccagcgctgaacacaaggtcaggcgcacttcaccgacaaacttcaggacgaaggtcccgtcttgctcggcgaactggattcttccggtactcatcaaagattcctgctcaacaccaatagggcgatatcatccggcatctcccctagcgtggccaatccaaaaacctgccgcaggccatccaggctgccgcccgccgacttgaccttttggggcaaggcggcttctttctctttgagtgtaggctctgtcagaaggtccaggatgccatcggacatcagcgtcaggctgaaggtcggcggcagttccaggatgtggtcttcgtaggtggcttcattgaacaagcccaccggcaaaccacgcccttccaggtagcgcacactgtctggagtgtataaaaccggcatcggcaggtgaccgccgatgctgtaggtcaaaagaccggtttcttcatcaatcacgccgccgaccatcgttacgtgcttgcccagcttgcagctgatcaagccccggttgatgtggcccagcacctcggagggggtgaactccggcaaggtgccattgcgcttggattcaaacaacagccgtgtagtcatgaatttcaacaacacggtgacaaaagcagaagaagcaccgtggccggacacgtcggccaggtagaacgcaacgcgccgctcgtccacacggaaataatcgacaaagtcacccgacaggtacaacgacgggatgatctggtgtgcgaacttgaactcgtcaaccgtccacgggttgaccggcagcatgttcatctgcacctggcgaccggcgttctggtcttcctggagcaggttgaggctggcttcgagttcgcggttggcggtttccagcttttcgcggtagcgctggttttcgaccagcaggcgtgcacggtccagcgcgcggcgcacggaatgctccagcaccgcaaggtcttccaaaggcttgatcaggtagtcggcggcgcccaggcgcagggcctcgacggcatcgttcatcacgccggcaccggacacgacaatcaccggcgtctgcggggcgagctcagtcacctggcgaatcagctccaggccgcccatctggggcatgcgcaggtcgcagatcacgaggtcgggcttgtcgcgctcgaatacctggagaccctgttggccattgctggcctgcaggacgctgaagccactgtcttccaaataggccgcgaggctcgcgcgcactacttcgtcgtcatcgattatcagcagcgtggcactggttttttgcatgtgggcaaacggcgccagaattaggttggcgtaggcggctcggcaatggccgggcgcacgtactggattcgctttctagcctctctgtcctacaaagcgcgggcttttgacccacgcacaacggtaaagcagaggtgcccttctaaggcgcagacggtactcccatccgtcaggggtttcaagctcatgccgatggtcgccgggcgtctttacaccgcaaatcaccgggagttataagaacagccaccaccacaacacaaagtaaggatggaaccgatgagcgaacacgagcgcgactacgccgaaaaacgcgatttcatccgcatgcgcgtggatgccgatgtgtcgctgatccacgcagggcaagagattgcgggggtttgcgtggacctttccagctccggcatgcaggttgaggcccctcgccagtttcaagtgggtgacgcactcaccgtacgcatcgactcggaacacgccgctctcgccggccttgaagcagacaccgaagtggtgtgggccaggaacgaaggcgagcgtcagcacctgggcctcaagatcttgaaaatgcactaaaaaatcgcacgcatgaaaaaggcgaccctgaggtcgccttttttcatttcaaaacgtcacgccttaaaagtcgtcgacaaccttgccgtcttttaccttgaactcacggttctgcaggtaagcgttacggataaaggtgtatttgtcgccggtgatcagcttctcgctgtcgagcaggctggcgcgggtatcgacaatgttcaggccgaaggtgctgttgcgccagccgatatcgttcatgtagcgatacggttgggtgtagctgtcgacgtatttggacggcgcatcacgcagggtgcttgggcccagcaacggcagcatcacgtaagggccgctgcccacgccccagtagccgagggtctggccgaagtcttcatcattgcggtgcaggcccattttggtgccgacatcaatgaagcccagcacgccgaaggtggtgtttaccagcagacgcgcagtgtcgacacccgccgcatgcggcttgagctgcaacacgtcgttggcaaagttgcccacgtcgccgatgttgcggaagaagttatggatgcccgtctgcacgaattgcggcgtgacgaactgatagccttgggccaatggcttgagggcataggtatcaacggtgtcgttgaacgtgaagatcgggcggttgacgctttcccacgggtcgtcttccgaggctgcctgggcggcgaacggcaccagcaggacagtggcacacacagatagctgagcgaggtagtggctccagcgcatagctttggctccttgaatggtctgtcatgggcgctatgccctgaataagaacgtgagtatatgacggaagtgtcaaattaggcagccagtaggaaaggccagatggaaaatgcacaaaattcctacaattacatgtaagtgtcacgcgcttgtcatcctgaccggatagcgtcatagctatttcagggatgtcgagatgcctcacgccgaaactgccgtcgccagcgccccgtctttgaccgcagtgctgtttggcctgagtggctgcctggtggatttcggttccctggcgcgcaccgacacgccgccccccgacgcccaacccacgccgggcgctttgaaaatcctgcgcagcctcaaggatcaaggcgtgccctgcgcctggctggacgaactccccactaccgtcaccaccccgctggcggccgtcctgccggactggctcaaggcagcctcgccctcccccatccgctggcccgccccacatgcttgctggcaggcgttgatggaactcaacatcgaacgcctggaaggctgcgtgctggtcagcggcgagccacgtttgttgcaagcgggcttgaatgccgggatgtggaccattggcctggcgtcctgcggctcactttgcggcctggcacccgatcagtggcaggcgttgaccgaacagcagcgcgaacacaagcgcggcagggccacggtggcgctgtatgggctgggggtgcattcggtgatcgatcacctcggcgagctcggcacctgcctggcggatatcagcctgcgccagctcaaaggcgagaagccctgatagagatcatgcactgaaggctgcggtggattaatctacaggtcagcccgtagacctttcccggcgcgccgcggtctatgccagtgcctatcgataaaaggaaacacgtcatgcctgatcgcaaaaaactggaagaacaggtcgagatcctgcgcgggcagttgcaacaggaaccgccgctgtcggaagagaaacgtgaagcgctggaagagttgattgccaagtttgaagtgcaacttcaattggaacccgctactcagacgcccagcatctctgacgatgtaaaccgggcggtggagggttttgaactggaccatccgggcattgccgggacattgcgcaatatcgtgatcaccctgggcaatatcgggatctaaccccaattcaaacccaaacgccgaaccccatgtgggagccggcttgtgtgggagctggcttgcctgcgatgcagacacctcggcgtttcagatgtaccggggtgatgctatcgcaggcaagccagctcccacacaggccagctcccacagtcagtttttgtgtgatggttactgccgtgccaggcgcacgttctggaactgcacatcttcagtgctgcggtacgggttgatatccagcccaccccgccgcacataccgcgcatacaccgtcaacgtctgcggcttcagcaagcgctgcaagtccaggaagatgcgctcaacacactgctcatgaaagtccgagtgctggcggaagctcacgatgtattccagcaaactcgcatgatccagcgcgtggccacggtactccaccaccacgctgccccaatccggctggctggtgaccgggcagttggatttgagcaaatggctgtgcacgctctcctcaacaacgcgtgattcatcacaacgcaacagctccgggcgcgggtgttcgtagttgctcacactgatgtccaggtcatcaatgcacacacccggcaacgccatcacgccgtcggcctcgatctcggccaggctgcgaatccgcacggtcaccggcttgccggcggcggcgctgaggtcggtgcgcagggtcgcttccaggcttgccgtatcggcaaacgcggtctggttcaacgagttgaggtacagcttgaaggacttggactcgatgatgttcggcgagtcagctggaatgctgaactcaccgatggccaccaccggtttgcccgagggcagcagccaggacagttcgaagcagttccagaaatccacgcccttgtaaggcagggtctcggcgctcaggcccagttcggcccacttggcggcgcgagggatcgggaacagcaacgatggagtgtaagtggagatgtattcactggacttgcccagcggcgaatgttcggctgcgggatgcatggcggaaacctggctaaataaaccgcgccagtctaccagcctttgcccccgcccttaagaatcgcctcactcaacggtcagcgtaccgaccatgcctgcctgatagtgcccgggaatgttgcaggcaaactccaggcccgtggctttggtgaaggtccaggtcagctcggcggttttgccgggttcaaccaatacgctgttggggtcatcgtgtttcatcgcgccatggcccatggccgcgtggtccatgctgcccatgccagtggcggtgagcatgccgctggcttgcatctgtaacatttccttctggtgttcggcatgcatcgccgcatcgcccaggttgaattcgtgcagcaactggcctttgttcaccaacacaaagcgcacggtctcaccggctttgacgtccagggacttgggcgagaaggaaatgtcctgcaacgtcacttccacggtgcgcgtggctttgctcgccggcgccggctggccgaacgcgtaggtgtgggccgcatcagccaccgcatcgaaactcaacgccagcaggcacgccgccagcaacagggggttacgcaaagccatttctattctccaaagtgtgtaacacgcttgggaagcactctaagatcgagccgctgccagccagctgactgctagattacaactttgtcagcttgcgccctgccccggatagccacggtataaagcccctcgtcacctgttgccaagagttgcccatgaaactgctgatcgtcgaagaccaaccgaaaaccggccactacctgcgccagggcctggccgaggccgggtttaccactgaactggtggcggacggctccacggggcagcatctggcgctgacgggggattatgacctgttgattctggacgtgatgctgccgggccgtgatggctggcaaatcctacaggcggtacgcagtgccgggctggatattccggtattgttcctcaccgcccgcgacgccgtggaagaccgtgtccatggcctggaactcggcgccgacgattatctggtcaagcccttcgccttctccgaactgctggcccgggtgcgcagcctgttacgccgtggcagcagcgcgccgcaggacactgcgctgcaactggccgacttgcggctggacctgatccgtcggcgagtcgagcgtgacggccagcgcatcgaccttactgccaaggaattctcgctgctggagttgctgctgcgtcgccaaggcgaggtgctgcccaaatcgctgattgcctcccaggtgtgggacatgaacttcgacagcgacaccaacatcatcgaagtggcgatccgccgcctgcgcctgaaagtcgacgacaactaccccaacaagctgatccacaccgtgcgcggcatgggttacgtgctggaggagcgcttcaattgatcaagcgcctgtccctggccagccgcctggcgctgttgtttgccgcttgcacggcggtggtttcgttgatcgccggggtgttgttcaaccacgccagcgaagcgcattttgtcgagctggaccagcaactgctcgacggcaagctggtggccctgcgcagcaccttgcagggcgtggacaccccgcagctattcgccaggcgtgaagtgcaactgcgcgccgaactcaatcgccaaccggacctggccctgcgcatcacggcaggtggccagcgctggtatgacgctgctcccggcgtcgccttgcccgaggcccccggcctgcacagcctgcaaaacgccggtaccgaataccgcgtgtacaacgtgccgctgcaacccggccagccgggctcgccgcaactgagcctgatgctcgacatcactcaccaccaacactttctgcaacgcatgcagcatctgatctggctcacggtaggtttgtcggccctggccaccgcgctgctcggtgcctgggctgcacgcagcgggctgcggccgttgcggcggatgggcgaagtggcggccggtgtgtcggcacactccctcacccaacgcctgccccagcaacaaatgccatcagaactggccgaactggcccagaccttcaacgccatgctgggtcgcctggacgacgccttccagcgcctctcggcattctcggccgacatcgcccacgaattgcgcacgcccctgtcaaacctgttgacccagacccaggtcatcctcacccagccgcgcccgctggaggattaccgcgaggcgctgcacagcaacctggaagagttgcaatggatggcgcaactggtcaatgacatgttgtacctggccaaggccgaccacggcttgctgacgcccaagcgtgaggcattggcgctggaggatgaagtggacgcgctgctggagttcttcgcactgctggcggaggacgcgcaggtcagcctggtgcgcgagggcacggcgcatacccaaggcgatcgcgggatgttgcgccgggcgctgtcgaaccttctggataacgcgctgcgctttacccccgcaggcggcgaagtgcgggtgcggctggaaaacggcgtgaggctttcagtcgagaacaccggcgaaggcattccacctgagttattgccaaagttgtttgatcgcttctaccgggcagacccggcgcgccatgaaggcagcagcgagcacgcggggctggggctggcgattacccagtccattgtgcgggcgcatggagggaagattttgtgtgaatccggggcggggtggacaaggtttgtgattgagttgcccgaggtagattgatgcaagctgggccggcctcatcgcaggcaagccagctcccacagttttgatttgtgaatacattcaaaatgtgggagctggcttgcctgcgatagcggcctcagaggttacgaatatctcagcgcatgcgccggctcgatcttcgccgcccgatacgccggatacagcgtcgccaaaaagctcaacacaaaacccgccgagcaaatcagcagcacatcgccgccctgcagttccgagggcaggttgctgacgaaatacacgtccgaactgaagatgtgctgcccggtcacgcgctccagccagcccaccaattcactcacgttcagcgccgcaatcacgccgagcacgccaccaatcagggtgccgacgataccaatcaccgtgccctgcaccatgaagatcgccatgatctgccgcggcgtggcgccgatggtgcgcagaatcgcgatgtctgcgcctttgtcattcaccaccatgatcagtgtggcgatgatgttgaacgcggccacagcgacgatcatcagcaacagcagaccgatcatggtcttttccattttcatcgcgctgaacaggctgccctgggtatgggtccagtcgtcaggcttgtaggctgcgcccaggctggcggcgatgtctgccgagactttgggtgccgcgtacaggtctttcaccgccaggcgcacgctttgcacctggttcggttgccaatgctggatctctgccgcgtcggccatgtggatcagggccatggaaccatccagctcggcgccgaccttgaagatgccgaccacgttcaaacgctgcatgcgcggggtgatgccgcccggcgcctccttactgacttccggcacgatcagcgtgagtttgtcgcccacgttcaggcgaaagcgtcgcgcggtgatatcaccgaccaccacaccgaactcgcccggtttcaggtcatcgagtttgccgcgcacgatgtgctgggccacgatggacaccttgccttcctgggccgggtcgacgccgctgatctcgatcggctgcatggagcctttgtaggagaacatgccgtccatctgcgtgaaaggtacggcggccgtgacttccgggttcctcatcgcggcgtcggccacgggctgccaattgtcgatagggttcacgccgacgatggtcgcgtggggcaccatgccgaggatgcgcgagctcatttcgcgctggaagccgttcatcaccgacaacaccacgatcatcgccagcacgcccagggcgaggccgatcatcgaggtcatcgagataaacgagacaaaacggttgcggcgcttggcgcgggtatagcgcgtgccgatgaaaatcgataacggtctgaacattcgcttgcaccgcctgaaaaaatgaaaaagcccggcgcatgaagcgccgggcttgaaacgggtcagatggcgaccagatgaccttcctgcaggtgcagcacgcggtccatctggcgggccatgctcatgtcatgggtcaccaccagaaacgcggtgcgcatctgggtgctcagctccagcatcaaatccttgatgccctgggcggtgtgggagtcgaggttgccggtgggctcgtcgagcatcaccagccccgggttgttcaccagggcgcgggcgatggccacgcgctggcgctcgccaccggacagctcggccggtttgtgttccaggcgatgaccgaggccgacgcgctccagcaaggctttggcacgctggcgcgcttccgggatcgcggtcttgccgatcaacaggggcatgcacacgttttccagcgcggtgaattccggcagcaggtggtggaactggtacacaaaaccgagcgaacggttgcgcagttggccacgggccttttcacccagagccgacagttcttcgcccgccagccagacactgccctgggacggcgtatcaaggccgcccagcaggttcagcaaggtacttttgccggaaccggaactgccgacgatcgccacgcgctcgcccgggtgcagttccaactgcaggtttgacagcaccaccaccgactccgggccttcctcgtaggatttgcccaggttgcggcagctcaggattgctttttcactcatgcccgattcactcataacgtaaggcctgtgctggctgggtacgtgccgcgcgccaggctggatacagggtggcaaggaaactcaggaccagcgcggcggcgcccaccatcaacacgtcctgggcctgaacctgggacggcaagtagtcgatgaagtagacgtcggcgttgagaaacttgtgcccgatgactttttccagcgcggcgatggcggcgctgacgttcaacgcagccaggatgccgacggcggtgccgatcagggtgccgaccacaccgatcacggtgccttgcaccatgaagatcgccatgatctgccccggcgtggcgccaagggtgcgcaggatggcgatgtcgcccttcttgtcgttcaccaccatcaccagcgtggagatgatgttgaaggctgccacggcgacgatcagcagcaacagcaggccgatcatggctttttccatgcggatggcctggtagaggttaccgtgggtgcgggtccagtcgcgggcgtagtactgggactcacccaggtgctgggcgatttcccaggagacgcgcggcgcatcgaacaggtcgttgaacttcaggcgcaagccctgcacctgatccggctgccagcggtgcaggcgcgccagatcggtgaggttggtcaggccgatatagccatcgatctcgccggcgccgacgtgaaaggtgccgaccacggtaaagcgcttcatccgcgggaacatgccggccggggtcacagtgacttccggcgcgacgaaggtcagcttgtcgccgatgttcacgccgagcttggccgcggccttgtcgccgatcacgatgccgaagctgccgggcgacaggtcatcgagtttgccctgcaacatgaacttgtcgatgatcgagacgttgcgctcctgggccgggtcgatgccattgagcaggatcttctgcaccttgccgtcattcgtcagcagcccctgcatctgggtaaacggtgcgacggccaccaccttggggttctgcttgaccttgccggccagggcttgccagtcattgatcggcgcatcgccttcaatggtcgcgtggggcaccatgcccagcacgcgggtgcgcatctcatgatcgaagccgttcatcaccgacagcaccacgatcatcacgaccacgcccaaggcgagcccgatcatcgaggtcaaggaaatgaacgacacaaaatgattgcggcgctttgcacgggtataacgcgtgccgataaatacgaagagaggtctgaacatgtcggggcttgttcggaggaaaagaagacgtcccggtggcggggtctggtaagcagctttacactctgaccattaccgttacctggggttcgccatgtcgacattagatgaagaagaacgccgcgaatactaccgtatcgacgacatgatcgcactccaaatcagcagcctgtcggcgcccgacgcggcgagcaaggaagtgttgctggatgattccccgctgttcaatctgctcagcgaattgcacctcagcgaattcgaagcccagcacctgttgcgccagatcagcgagaaagaccgcagcctggccgccttcctcaaagtgcagaacaaacgcctggatttgctcagccaggtgatggcgcgcgggctgttgagcgaggtcggcgaaccgcagccggtgatcatttccgaaggcggcatcgacttccagcaccccaccccgctggcgcccgacacccacctggccgtcaagctggtgctgatgccccaggcgctcggcttgctgctgcgtgcgcgggtcacccattgcgacctcaagggcgacggctttgacgtgggcaccgagttcgaatccatgaccgacgcccaacgccaactgctggcccgctacatcctgcaaaaacaagcccaggaacgccgcctggcgcgggaacaaagcgacgccctggacacctgaattcgtattatcccgccagatcacctggcgcaaaggagcaactgtgaccctgatttatggccaccgcggtgccaaaggcgaagcaccggaaaacaccctgaccagctttcaggagtgcctcaagcacggcgtacgccgctgcgaactggatttgcacctgtccatggacggcgagttgatggtcatccacgacccgaccctcaaacgcaccgccgaccggcgcggcaaggtcgtcgagtattcggcggcggacctggtgaagatggacgcgcgcaaaggcggcccgggctgggtcaagccgtgcccgattccacgcctggaagagttgtttgagcagtgtgatttcgatcactggcagctggaagtcaaaagcgcttcgcgcacccgtgctgcaaccaccgtgctggcgattcgcgagatggccgtgcgccatggcctgatggacaaggtcaccgtgacctcaagttcgcgggaagtgcttaaagcggcagttgaactgaccccggacttgtcgcgcgggctggtggccgaatatgcgtggctcgacccgctgaaagtcgcgcagaactacggctgtgagtatttggcgttgaactggacgctgtgcacccctgaacgtctggaaaaagcccagcgccagggcttgcacgtgtccgtgtggacggtcaacgaacctgcgctgatgcgcaggctcgccgacttcggcgtagatagcctgattacagactttcccggtttggccactgccaccctcgagaattactgaaatcggtctccccggccggctcaggccaccggccggagccgctcaaaaaagccggttgaggccgtcgtaggccgctacccgataggcttcggccatggtcgggtagttgaacgtggtgttcacaaaatacttgagggtattttgctcgcctggctggttcatgatggcctggccgatgtgcacgatctccgaggcctggtagccgaagcaatgcacgccgaggacttccagggtttcgcggtggaacaggatcttcagcatgccttgcggctcaccggcgatctgcgcacgtgccatgctcttgaagaacgctttgcccacttcataaggcaccttggccttggtcagttcgtgctcgttcttgccgatcgagctgatctcgggaatcgtgtagatcccggtcggcacgtcgttcacgtagcgccagctgccattgtcaacaatgctgcctgcggccgaacggccctggtcgtgcgcggcactggccaggctcggccagccgatcacgtcaccggcgccgtagatgttcggcacgcaggtgcggtagttctcgtccacctcgatctggccacggctgttgaccttgaccccgatgttttccatacccagcttgtcggtgttaccggtacgaccgttgcaccacagcaaggcgtcggccttgatcttcttgccggacttgaggtgcaggatcaccccgttatccaggccttcgacccgctcgtactcttcgttgtggcgcacggtgatgttgttgttgctgaagtggtagctcaacgcctgggaaatttccgagtcgaggaagctcagcaattggtcgcggttgtccaccagctcgaccagtacacccaggccgctgaagatcgaggcgtattcacagccgatcacgccggcgccatagatgatcagtttgcgcggggtgtggcccaggctcaggatggtgtcgctatcgtagatacgcgggtggtgaaaatcgatatcggccgggcgataagggcgcgaaccggtggcgatgatgatgtgcttggccaccagtttttcgaccacgccgttggcgcagacgacttcgacagtttgctcgtcggcaaagctgccggtgccgaagaacaggtcgacgcggttacgcgcgtagtaaccggtacgcgacgcgacttgtttggagatgactttctcggcgcttttcaacacgtccggaaacgagaaccagcgcggctcaccaatggcccggaacatcgggttggtgttgaactgcatgatctgacgcaccgagtgacgcaacgccttggacgggatggtacccaggtgggtgcagttaccgccgacctggcgacggctatcgaccatcgccactttgcgccccgctttggcagcgttcatcgccgcaccttctccagccgggccggaacccagtactaccacgtcgtagttgtagacagccatgcgtactcctcagaacaggccaggcgcacggttggacgcctggctaaatcatgccgcggccagcgggcatgaaggaaatttttggctcaagtgtgtgagccggggcacagtctatataaggctcaagcccgcgcacattaacccttggtcgcgtcgtaggccagtattgcgtttactacagcatcaggaaaatgcaattacactcccgctacgcaccctcgcaggacgagccattatgcggcatgtcgttttctgtttaatgttgatgttgtcgatcacggtgcaagccagtgaagcggaccggctcaagcaggcgaacttcccggcgcagtcccatgagctgctactgaaaaaccagaccgtgctggtctatctgtgggtggatgtgtacgccgctgcgctctacaccccggctgacgtcagcgcgaaacaggcctggaaccagcaaaaagacctgcggttggcgctttattactttcgcgacatcgaccgcagcgatgtgatcaaggcagccactaccgccctcgaacgccagcaacccactgccaccctcgcccgcctgaagccggaactggaccaactgcacgcccgctttcgggacatccgcagtggcgatcgctatgccctggattttcgccccggccgcggcctgaaccttgagatcaatgaccaggtggtgttcagcagccgcaatgatgagctggcgagggcttacctcggcatctggctcgcgcccaaaggcctgtccgacagcctgcgcaataccctcctcaactgatcaccgctctagaaagcagcacaaaaccaatgtgggagctggcttgcctgcgatagcggtgggtcatccattcatttgctggctgacacactgcaatcgcaggcaagccagctcccacagtgatttccatcgacaatgacattcgcgcatttagtcagcgtgctatcaatttttattgccgatggtggccaatacacatatggttacaaaacggcagcaaggacgaaagatgaccagggatcactaataaaatagccaagatgagtgcatgacatgtccacttcaacgggcaagggcaaggcgatttttcgcgttgtcagcggtaacttcctcgaaatgttcgacttcatggtctacggcttctacgccacggccattgccaagaccttctttcccagcgacagcgcctttgcctcgctgatgctgtccctggcgaccttcggcgcaggcttcctcatgcggccgctgggcgccatcttcctcggtgcctacatcgaccgccatggccgcaagaaaggcctggtgatcacccttgccctgatggccgccggcaccatcctcattgcctgcgtgcccggctacgccaccctcggtgttgccgcacctctgctggtgctgtttggccgcttgctgcaaggtttctcggcgggcgtcgagctgggcggcgtgtcggtgtacctggcggaaatcgccaacccgggccgcaaaggcttcttcgtcagttggcagtccgcgagccagcaggcggcggtggtgttcgccggtttgctcggtgtaggcctgaaccactggctgagcccagaagaaatgggtgactggggctggcgtgtgccgttcctgatcggctgcctgatcgtgccggtgatcttcgtgattcgtcgctcgctggaggaaacgcctgaattccaggcgcgtaaacaccgtccaaccctgcaggaaatcgtccgctcaatcggtcagaacttcggcgtggtgattgcaggcatggcgctggtggtgatgaccaccgtgtcgttctacctgatcaccgcctacaccccgaccttcggcaaggctgaactgcacttgtccgacttcgacgcgttgctggtgacggtgtgcgtgggcatttccaactttatctggctgccattgatgggcgcggtgtccgacaagatcgggcgtaaacccctgctgctcggcgcgaccattctggcgatcctcaccgcttatccggcgctgtcgtggctggtggccaacccgagtttcagccatctgctgattgtgctgctgtggctgtcgttcctgtatggctcgtataacggggcgatggtggtggcgctgaccgagattatgccgattgaggtgaggactaccgggttttcgttggcgtatagcctggcgacggcgacctttggcgggtttacaccggcggcctgtacctatttgatccatgtgctggataacaaggcggcgcccggcatttggttgagtggcgcggcggtgttggggttgattgcgacgctagtgttgtttaaaggtaatcgccatgagctgaggacggcgcaggcttcggtggtaggcggcgcctgataaatagctatcgcaggcaagccagctcccacagggtgaccgcatttttcctgaataaacgcgatcaaactgtgggagctggcttgcctgcgatgaggccctcacattcaacccaaaatctgcaggcacaaaaaagccccgaaccagtcggggctttttcattgtccactaaagcttagcgcgggaacgacggcgggttaaccccggccatgtcttccatcacgcgaaccacctggcagctgtagccgaactcgttgtcgtaccacacgtacagcacaacacggttgtcctgggtgatggtcgcctcggcgtccaccacaccggcgtggcgcgagcctacgaagtcggtggacaccacttcctgcgaattgacgaagtcgatttgcttgtgcagatcggagtgcagcgccatgtagcgcaggtactcgttcatctcttcacgggtggcggctttctcaaggttcaggttgaggatggccatcgacacgtttggcgtcggaacgcggatcgcgttaccggtcagcttgccggccagctcaggcagggccttggcagcagcggtggcggcaccggtctcggtgatcaccatgttcaacgcggcgctgcgaccacggcgatcgcctttgtggaagttgtcgatcaggttctggtcgttggtgtacgagtgaacggtctcaacgtggccgttaacgatgccgaacttgtcattcacggctttcagcaccggcacgatggcgttggtggtgcaggaagcggcggacacgatcttgtcgtcagcggtgatttcaccgtggttgataccgtgcacgatgttcttcaacttgcctttacccggcgcggtcagaacaacgcggtcgatacccgggcacgccaagtgctggcccaggccgtcggcatcacgccatacgccggtgttgtccaccagcagagcgtccttgatgccgtactgggtgtagtccacctcagccgggttcttcgcgtagatcacctggatcaggttaccgttggcggtgatggtgttgttttcttcgtcgatgacgatggtgccgttgaacgggccgtgtaccgagtcgcgacgcaagaggctcgcgcgtttggtcaggtcattctcggcgcctttgcgcaccacgatggcacgcaggcgcaggccgtcgccgccaccggttttttcgatcaggatgcgcgccaacaggcggccgatacgaccgaaaccgtacagcaccacgtcagtgcctttgcgggcagcagcgttttgctggccaaccacatcagccatctcttcacgcacgaactgctcggcgctgcggccggcaccttctttgcggaatttataggccagcttgcccaggtctaccgaagccgcaccgagcttgagctcgctcatggctttaagcagcgggaatgtttcgtggacggagagttcgctgtcgtcggcggaacggtgacgcgcaaagcggtgggctttgagaatcgcgatgacagactggttgatcaggctgcggccatagatcgagctcaccacattgttattgcggtacagctgaccgataagcggaatcatcgcttcagcgagcgcttcacggtcgatccattcaccaagacactggtcgggcttctgagtcacgggaaccttccacatgtaggggcagaaaaaaggggctacattatgccgcccgaccgccctctgagcaatgcacgccagccaacaaaaagtgcttgcgaaaaattgacaccccgctgcaagccagtaaatacgcgggttccagagggccaccttttgcaggagcaacgcaacttgtccgtaaccctccgaaaacctcacgctttttgacactacatattgagtcaaaacccgccattgtttgtcttaaccactacatttcctgcaaaccgtaataggctcagtcagcaactgacaggcggcacctcgggccgttacaattaccgactttgtcgcaacgcttggagctcaaccttccgtgcccgttctgcgtctaccgcttctccctgccgcggcaggtaaacagcactggggcaacctgcccggtgccgccctgagcctggccatcgccgaggctgccagcgcagccaagcgctttaccctgctgctcaccgccgacagccaaagcgccgagcggctggagcaggagctgagcttcttcgccccggatttgccggtgctgcatttccccgattgggaaaccctgccctacgacctgttctcgccgcaccaggacatcatctcccagcgcatcgccagcctgtaccggttgccggaactggcccacggcgtgttggtggtgccgatcaccacggccctgcaccgcctggcgccgaccaagttcctgctcggcagcagcctggtgctggatgtcggccagaagctcgatgtagagcagatgcgcacgcgcctggaagccagcggttatcgctgcgtcgacaccgtgtacgagcacggcgaattcgcggtacgcggtgccttgatcgacctgttcccgatgggcagcaaactgccgtttcgcattgacctgttcgatgacgaaatcgagaccctgcgtaccttcgatccggaaaaccagcgctccatcgataaagtggactcggtcaagctgctgcccgcgcgggaattcccgctgcaaaaggacgcggtcacgcgcttcaaggcgcgctttcgcgaacgcttcgacgtcgacttccgccgttgcccgatctttcaggatttgagcagcgggattacaccggcgggtatcgagtactacctgccgctgttcttcgacgaaacctccacgctgttcgattacctgccccaggacacccaagtgttctcgctgccgggcattgagcaagcggcggaaaacttctggaacgacgtgcgcaaccgctatgaagagcgccgcgtcgatccggcccggccattgttgccgcccgccgagctgttcctgccggtggaggactgcttcgcacgcctgaaaaactggccgcgcgtagtcgccagccagcaggatgtggaaagcggcgccggccgcgagcgcttccccgcgcaaacgctgccggacctggccattcaggccaaggccacgcagccactggaagcgctgtcgaattttctcggcgacttccccggccgcgtgctgttcaccgccgaatccgccggccgccgcgaagtgctgctggagttgctggaacgcctgaagctgcgccccaaaaccgtcgacagctggccggactttgtgaaaagcaaagaccgcctggcgatcaccatcgcgccgctggatgaaggcttgctgctggacgacccggcgctagcgctgatcgccgagagcccgctgtttggccagcgcgtgatgcaacgccgtcgccgtgaaaaacgcgccgacgccaacaatgatgcggtgatcaagaacctcaccgagctgcgcgaaggcgcgccggtggtgcatatcgaccacggcgtgggccgttacctcggcctgcaaaccctggaaatcgacaaccaggccgccgaattcctcaccatggaatacgccgaaggcgccaagctctacgtgccggtcgccagcttgcacctgatcgcgcgctacaccggcagcgacgacgccctggcgccattgcaccgcctgggttccgagacctggcagaaagccaagcgcaaggccgccgaacaagtgcgcgatgtggccgccgaactgctcgacatctatgcccgccgcgctgcccgcgaaggctatgcgttcgccgacccgaaagccgactacgccaccttcagcgccggtttcgccttcgaagaaaccccggaccagcaaaccaccatcgaagccgtgcgtgccgacatgctcgcgcccaagccgatggaccgcctggtgtgtggcgacgtaggcttcggcaagaccgaagtggcgatgcgcgccgcctttattgcagtgcacggcggcaagcaagtggcgatcctggtccccaccaccctgctcgcccagcagcattacaacagcttccgcgaccgctttgccgactggccggtgagcgtggaagtgatgagccgcttcaagtccgccaaggaagtgaacgcagccgttgccgacctggcggaaggcaagatcgatatcgtcatcggcacgcacaagctgctgtcggaagacgtgaagatcaaaaacctgggccttgtgatcatcgacgaagaacaccgtttcggtgtgcgtcagaaagaacagctgaaaaacctgcgcagtgaagtcgacatcctgaccctcaccgccacgccgatcccgcgtacgctgaacatggcggtgtcgggcatgcgcgacctgtcgatcattgccacaccaccggcgcgccgcctgtcggtgcgcaccttcgtgatggagcagaacaaaagcacggtcaaggaagcgctgctgcgcgaactgctgcgcggcggtcaggtgtactacctgcacaacgacgtgaagaccatcgagaaatgcgccgccgacctcgccgagctggtgccggaagcgcgtatcgccatcggccacgggcagatgcgcgaacgtgaactcgagcaggtgatgagcgacttctaccacaagcgcttcaacgtgctgatcgcctcgaccattatcgagaccggcatcgacgtgccgagcgccaacaccatcatcatcgagcgtgccgacaagttcggcctggcccagctgcaccaactgcgcggccgggtcgggcgcagccaccaccaggcgtatgcctatttgctgacgccgccacgccaacagattacgtccgacgcagaaaagcgcctggaagccatcgccaatacccaggacctcggcgccggttttgtgctggccaccaacgacctggaaatccgtggcgccggcgagttgctcggcgacggccagagcgggcagattcaggccgtgggtttcaccctgtatatggagatgctcgaacgcgcggtgaaagccatccgcaagggcgagcaaccgaaccttgatcaaccgttgggcggcgggccggaaatcaacctgcgcttgccggcgttgatccccgaggattacctgccggacgtgcacgcgcggctgatcctgtacaagcgcattgcctcggccaccgacgaagaaggcttgaaagacctgcaggtggaaatgatcgaccgcttcggcctgttgccggaaccgaccaaaaacctggtgcgcctgaccctgctcaagttgcaggccgagcagctgggcatcaagaaagttgacgcagggccgcagggcgggcgcatcgagttcgaagcgcaaacgccggtggacccgctggtgctgatcaagctgattcagggccagcccaaccgctataagtttgaaggggctacgctgttcaaattcatggtaccgatggaacgtgcggaagaacgctttaacaccctggaggcgctgtttgagcgcctcatcccgaaatctgtttgaaggacgcccccatgcgcctgttccgcattctgagcttgttgttggtggtcgtggcgcctgcggcatttgccgacagcccgtaccaggtggaaatgatcctggtacgccagaatgcggagccggtgatcaacagccggcccgcgccggaaaactgggatgcgggagcacaacgcctgggcgaaaaattgagcccgccgcgcctgtccaacatcgtcgacaagctgcgcgccgacaacagctacacggtgctggcgcacaaggcctgggagcaaaatctcggcgagcagccggtgaaaatcgccatcacggacggccaggagcaattcggccagttccccatcgaaggcgtgttgaacctgcaattgggccgcttcaccgacatcgacgctgacttctggatcaaccagttcgacagcaatggcagcgtagtggccagcgaacacctgagccagaccgacgtgcgcaccaagaataaccagctcaattacctcgacggcggccacctcgcgctgctgatcaagatcacctcgctgaccgccaagccacccagcgctccgccgcccgacattcaggactgatccagcgccatgcccctgacgtcgccgttgaccaaacccttggccccttcgtgggccaatcgctttaaagagcagagcctggagcgcgggcggcgttatgccctggaaaaccgcgtgcgcattgtcgagtcgggcgacagcaccatcattgccagttgcgaaggttcgggcggcaacgtctatcggcagaccatctcgttgcgcgagtcggccaaaggcacgttgattctggtagacagccgctgtacctgcccggtgcacactaactgcaaacacattgcggcggtgttgctcaaagtccaggaaaccctggcctatccggccgcagcccaggatgccgaactcctggaaaagctccaggccgtactggataaccgcgtggtgctgccgcaagtgctgatggaggacgtgctgcccgtgccgcgcctgtggatggccagcgtggagttcagcgcgtttgagccgcgtaacggcaagatgcagcgctatatccagcatcgcgcagcgctgtcgtttaactacctgggcaattatgtcagcgggcaaaagaatgccgacatcatcgtgcgccaggaagcccagagcctgcgcatcaagcgccatcccgaggtggaacaacgctatcgtgaacagctacggttgctgggcttcaagatcgccacgcgccagagcaaggcactgcccgaaagcgccggcgaattgttcgagatggtcaatgacagcgcctggctgacgttcacgctcaacgccacgccgacgttgcgggccgagggctgggagttgttgatcgatgatgatttcggcttcgacctgagcgccgtcgatgactggtacgccactgtcgatgaaggcccggagcgtgactggtttgatctggagctgggcattatcgtcaacggcgagcgcctgagcttgctgccgattctgttgaacctgatgcgctcccataccgagattctcaaccccgaaaagctcgcgcggcgtcgggatgatgagctgatcctggtgaacattccgggcctgccaaatggccatggcccgatccaagtggcgttgccctacggccgactgaaacccgttctggccaccctcggcgaattttacctgcaggaaaccggcaccaccacgctgcgcctggccaaggccgatgcgattcgcctgaacccgctggaagacctgccactgcaatgggaaggcggcgaaaaaatccgcaactttgcccagcgcctgcgggatatcaaggacttcacctgcgtggtgcccgagggcttgaacgcgacactgcgtccgtatcagttggaaggcttgagctggatgcagtcgctgcgccagctggatgttggcgggattcttgcggatgacatgggcctgggcaaaaccctgcaaaccctggcgcatattctcaccgagaaaatcgccggacgcctggatcggccctgcatggtggtgatgcccaccagcctgatccccaattggctcgacgaggcagcgcacttcaccccgcaactcaaggtgctggcgttgtacggcgcaacgcgtaaaaagcatttcccgaaccttcaggactacgacctgctgctgaccacctacgccctgctgcccaaggacatcgaacagctcgccggcctgcccttgcatgtgttgattctcgatgaagcccagtacatcaagaaccccaacagcaaggccgcccaagctgcgcgcgagttgaatgcgcggcagcgcctgtgcctgagcggcacgccgctggaaaaccacctgggtgaactatggtcgttgtttcacttcctgctgccgggctggctgggcgacgtgaaaagcttcaaccgcgattaccgtgtgcccatcgaaaaacgcgccagtgacgtgcgattgcagcacctcaatggccggataaaacctttcctgctgcgccgcaccaaggaacaggtggccacggaactgccgcccaagaccgaaatcatccactgggtcgacctgaatgaagcccagcgcgacgtgtacgaaaccatgcgcctggccatggacaagaaggtccgcgacgagatcacccgcaagggcgtggcgcgcagccagatcatcattcttgaagcgctgttgaagctgcgtcaggtgtgctgcgacctgcgcctggtcaacgacgccgccctgcccgcccgtggcagcagttcgggcaagctcgacagcctgatggaaatgctggaagagttgtttgcggagggccggcggattttgctgttttcccagttcacctcaatgctgagcctgattgaaatcgagctgaaaaaacgcggcgtcgcctatgcgttgctgacgggccagacacgggatcggcgcacgccggtgaaggacttccagagcggcaagctgcagatttttctgatcagcctgaaggctggcggcgtgggcctgaacctcacggaagcggacacggtgatccactacgatccatggtggaacccggccacggaaaaccaggccactgaccgcgcttaccgcatcgggcaggagaagccggtgtttgtttacaagatgattgcgcggggcaccgtcgaggagaagattcagcacctgcagaaggagaagtccgacctggcggcgggtgtgctggatgggcgcacgacgggggattggcagttgggtaacgaggatatcgaggcgctgtttgcgccgttgcccaataaacaagagaagcgctgactgtcaggccgctatcgcgggcaagcccgctcccacatttgattgcattccaaagctggaactcggtcgaatgtgggagctggcttgcctgcgatggcagcaacacggctttcagtcgatcaactgcgcatcccgcaacgcggtaatcgccgccaaccaccgcgggtcttgcttgtaatccgtcgaagcaatcgcctgcccacgcatccgcgcaatccgcgccgacggcgtgaccttcatccgctgtgcagcgctcaatgccagctccgcagccgcacggtcattgcataccaaccccatgtcgcaacccgccgtcagcgccgcttcgatccggctggccgcatcaccgaccacatgggcaccggccatggacaggtcatcgctgaaaatcaccccgtcaaactgcaactcgccgcgcaggatgtcctgcaaccagcggcgcgagaaaccggcaggctgggcatcgacttgcgggtagatgacgtgggcaggcataaccgccgccagttgcttgctcagccatgcgaaaggcaccaggtcatgggagcgaatctgctccaggctgcgctcgtcattgggaatggcgacgtgggaatccgcctcagcccaaccatggcccggaaagtgttttccggtagcggccatgccggcgctgttcatgccacggataaaggcaccggcgagcacggcagcgcgttcggggtcgccttcaaaggagcgggtgccaacgacggcactgcgttggtagtccaggtccagtacgggggcgaagctcaggtcgaggcccacggccaggacttcagtggccatgatccagccgcactgctcggccaggtattcggcattggtgttgtccgccagtgcgcgcatggccggcagccgcacaaaaccctggcgcagacgttgcacgcgaccaccttcctgatcgacggccaacagcaggtccgggcgcaccgcacggatcgacgcactcaactcacgcacttggcggggatgctcgatattgcgcgcaaaaatgatcagcccgcccacttcaggctggcgcaacaggtggcgatcctcagccgtcagccaggtaccggcaacgtcgaccatcaaagaaccttgcagcgcagcagtcataaaccttccttaaataacgcacacaacccgcggccctcagcctgcgcgatgggcgcagcgagtgcagcgggttgtgagtaaatagctgaaatcggcatggcggctagcttagcggccatgcacacagggggcaatcatgccttggcgatggcgggcgtcgacttgctgcgtgggcgcaattgagcggcggccatggacgggtcggtcacgccggtttcggcacgcatgccggcggcgaggaatggcaccatcaggcgcatcacctgctcaatcgaagtattcacgccgaaatcggtctcggcaattgcacgcaacgccttgatcccggacatgctgaacgcggccgcaccgagcatgaaatgcacgcgccagaacagctcgatcggtggaatgcgtggggcggcttcattgaccagcaacatgtagcgacggaaaaccttgccgtacatgtcttccaggtaacggcgcaggtgaccctggctctggctgaacgccaggcccagcaggcgcatgaaaatcgacaagtcgttgccgctgcgcggttgaaccaccagcgcttgctcgaccagtatttccagcagctcttccaggccgggcttgttctcgggtttagtctggcgacgctccagctcacggtcaaggctggcgcagaaaggccccaggaaacgcgagaacaccgcctggatcagggcctttttcgagccgaaatggtagttcactgcggcgaggttgaccccggccttgctggtgatcaggcgcaatgaagtttcagcaaatcctttttccgcgaacaactgctcggcagcatcgagaatgcgttcaacggtttccgactgggccatggctactccgcctgacaaacacttgtttgaaacatacgtttcagagtatgtcttgtcaagcctgcgggtccgttttccggccgggcagtcatcaatttcatcgctatttaatcacatccgtatcggtctgtaggcagcgctatccctgccttgtaggacggctgacgaatgaccgtccagcggagtgcccgaaaaggatgattgccaagtacagttcactgtatataatcccagtcactgtataaaaagacagagcgatcaacatgctaaaactgacgccacgccaagctgagattctggcttttatcaagcgctgcctcgatgacaacggctacccgccgacacgagcggaaattgcgctggagctggggttcaagtcccccaacgccgccgaagaacacctcaaggccctcgcccgcaaaggcgcgatcgagatgaccccgggtgcttcacgcggtattcgcatccctggcttcgaagccaaggccgacgaatcgacgctgccgatcatcggtcgcgttgccgccggtgcaccgatcctggcgcagcagcacgtcgaggaatcctgcaacatcaacccgaccttcttccatccgcgcgccgactacctgttgcgcgtacacggcatgagcatgaaggacgtgggcattttcgacggcgacctgctggccgtccataccacacgtgaagcccgtaatggccagatcgtcgtcgcacgtatcggcgatgaagtcaccgtcaaacgcttcaagcgcgaaggcagcaaggtctggttactggccgagaaccctgagttcgccccgattgaagtgaacctgaaagatcaggacctggtgatcgaaggtttgagcgtcggcgtcattcgccgctagaggaggcaccatgcagttcatgcacaccccgcaacaggcacaattgtcgctgtttgaggcttttatggcccaaccccttgcgcccatcctcaaggaaacggtcgaagcgccctggagcgccgaacctgaggcgttcagtgaactgtcgttgcgtggtgctgcaggaagctgcctgagcctcctggcgccgatccttcgcgagttgagcgaagaacaggatgcgcgctggctgacactgatcgccccgcccgccagcctgacgcaggcgtggctgcgggacgccggccttaaccgtgaacgcattctgctgttgcagccacgtggcactcaaagtgcccagcagttgacctgcgaagcgttgcgcctgggccgtagccatacggtagtgagttggttgaacccgttgaatgcaagcgcaaagcagcaactgatcagcgcagcgcgcatgggcgatgcacagagtttgaatattcggttgggataaaacacaggctggcttgtggcgggcgagcttactgtggcgagcgagcttgctcgtgctgggctgtgaagcggccctaaatgaattgatacggtatatcaggcattccacggtgtctggttttgggctgcttcgcagcccagcgcgagcaagctcgctcgccacaaaagaccgctcatcgcaggggccacattaactacgacggccgccttcgggtgtcagtgaagaacccgcggcccatcttctttctccggttcgccttccgccaggcggccggccatctgcacacccacgctcaacatggctttagccacttccacgtgctggccctgcaggaacgcttttgcgtcctcggaaaaatccagaataaccagagaaccctcgtcctcagcccggcgcagctcgattcggccgtcaggcagttcaacaatttccagaaaggacgttggcataaaagtctgttctccacgaaaggccgaaattatatcagtcatccacccggcctcgctgaggatctgagcaagtttctttacggcttgatgaatggtgctctcgacaacgccgatatcattgtgggagctggcttgcctgcgatacagacgcctcggtctttcagttaaaccgaggcgatgctatcgcaggcaagccagctcccacattggttcaacgcaagcttctcagcactcgttcaaaccctcacgaaagcgcagtgccatctttttcagctcctggcgccagctttccagttcttcccggctcaatggcttgggttcgtcctcttccagagcgagcgccacaatcaacggctgggtcacatcgcccttgggcacatggggaatgcgcggcggctgaaacatatcggaatgggctttgagcaaacgtgcgacccaactatcagggctctgggccatctccaccaattcagccagctcgggaatggccatgctctccagcacttcgcgggtcatgatcatttccgcacgcggagaaccggcctggggcaagcgatagaacccggcaatttcatggcacaggcccagcaaggcaccgtacaggtggaacaacgccgcctcacgccccgcctgaaccagcgcaatggcgttcatctctttcccttcctcggcgcgaccaagggcttccagggataaacccgcgaagtaaattttctgattggtacgggtatagagttcgttggccataacggcagtctccacaacgaaaaagcgtgatgctggctgaacagtgtcacggatcagccgaacgcactgcaagtgcaaaaaaaggccgcctgttaaggcggccttcgtatatggctgattagccgatcaagcgccctggcgcttgtcctcgaccttccacttgccgccgtcgtagaacgctttccagccggtaggcttgccgtccacttcagtctgcacgtactgctccttggtcttgcggctgtagcggatcacagccgggcggccgtccggatccttcttcggcgcttcacacaggaagtggtacttcggatcgatctcgtccttgtgcggcacgatctccagcaccagcggtgcacgggtttcgcggtttttcgggaactggctggcggccaggaacaggcccgaagcaccgtcacgcaggatataggtgtcgttgaccttctcgcacttgagctcgggcatcttcaccgggtccatcttcggcggtgccgcgtcaccgcttttcagcagtttgcgggtgttcttgcaggtcgggttggtgcaaccgaagaacttgccgaaacggccggtcttgagctgcatctcgctgccgcacttgtcgcattccaggctcggaccttcgtagcccttgatgcggtaagtgccttcttcgatctcgtagccgttgcaatccgggttgttaccgcagatgtgcagcttgtgcttctcgtcgagcaggtaggcgtccatcgccgtgctgcagatcgggcagcggtgcttgccacgcaggaccagcgactcggattcgccctcgtcgtcagccgcaatttcatcgcccggcaccaggttaacggtagccttgcagcgctctttcggcggcaggctgtagcccgagcaaccgaggaacacgccggtagacgccgtacgaatctgcatcgggcggccgcacgtcaggcacgggatgtcagtcatcaccggctggttggcacgcatgccgctctccgggctttcggccacttcgagctttttcttgaagtcgccgtagaactcgtccaacacgtttttccagtcgcgttcgccctgggcaacgtcatcgaggttctcttccatgccggcggtgaagccgtagtccatcaggttggagaagctctcggacaggcgttcggtgacgatgtcgcccatcttttccgagtagaaacgacggttgtgcagcgccacgtaaccacgatcctgaatggtcgaaatgatcgcggcgtaggtcgaaggacgaccgataccgcgcttttccatctctttcaccaggctggcttccgagtaacgcgccggcggcttggtaaaatgctgcgacgggtcgagcttgatcagcttcaacgtgtcgccctgggccatgtccggcaacacatcatcatcgccaggcttggcgatttgcggcatcacacgggtatagccgtcgaacttgaggatacggcctttggcacgcagctcgaaatcgccagcacccacgctgacggtggtggacaggtattgcgccggcagcatctggcacgccaggaactggcgccagatcagctcgtagaggcgctcagcgtcgcgctccatgccgctcagcttggcaggcgtggtgttggcgtcggaaggacgaatcgcttcgtgagcctcctgagcaccctccttgctgctgtagacgtttggcttctccggcaggtatttcttgccgaattcgctttctatataagtacgcgccatcgccactgcgtcttgcgacaggttggtggagtcggtacgcatataagtgatgtagccggcttcatacaagcgctgggccatcatcatggtcttcttcacaccaaagcccaggcggttgcttgcggcctgctgcagggtggaagtgatgaacggcgccgacggcttgctgctggtcggtttgtcttcacgcttgacgatgctgtagctggaagccttgagcttctccagcgcggccatggcctgggcttcgttcagcggcttgaaggcctcgcctttctcgcgggccacttcaaagcgcacgttggcgcccttggcggtgccaaggtcagcatggacttcccaatactcttcggggttgaacgctcggatctcgcgctcacgctccaccaccagttttaccgcaaccgactgcacacggccggcggacaggccacgggcgatcttggcccacagcagtggcgagaccatgtaacccacgacgcggtcgaggaaacgacgagcctgttgggcgtttacacggtcgatatccagttcgcccggcttggagaaggcttcctggatggctttcttggtgatttcgttgaacaccacacgcttgtagcggctgtcgtcgccgccaatggcttcgcgcaggtgccaggcaatggcttccccttcgcggtccaagtccgttgcgagatagatggtgtcggcatctttggcgagccggcgcagctcttcgatgaccttttccttgcctggaaggatttcgtacttggccttccagccatgatccgggtccacacccatgcgcgagaccagctgcttgcgcgctttctctttaggcgtgagcaccggaccttcgcccgcagccgccttgccgcgcttggcggctggctccttgctggcgctagccgaaccgctggtgggcaggtctcggatatggccgatactcgacttcaccacgtactcgttgcccaagtacttgttgatggtcttggccttagccggggattccacaatgaccagcgatttgcccatggatcggaaaattcctgaattcgagaagagaaaggcagttggcgcctgtcgcggcaacgctatatatagtggcaacaaggtgaggtcaagcgcagcattctgcgcggcctgccgttattgccctgaaaaaagactgggttcggcctggaccaaagcaaagcgcgggacctgctcgccgtcaacttcgacggtttccaagaacatgctcaatgggcgcacccaaaagccgtaatcgccatacagtgcttggtaaaacaccacttcttcttcggtctcggaatgccgtgccacgttaaaaacacggtactgcggacctttataatgctggtagagccctggttcgactttcatgctctggccctcttacaaaatgccttgaaaaaaaaaattaaaaaatccaaaaaacaaaaaccggggcactgggccccggcttccgtcaacggaacgcttaaacgcgttcgaagacggtggaaatgccttggccgagaccaatgcacatggttgcaaccccaaggttgccgccattttgcttcatcacgttaagcaaagtgccggagatacgtgcaccggagcaaccgaatgggtggcccagggcaatcgcaccgccgtgcaggttaaccttctcgttcatcttgtcgagtactttcaaatctttcagcacgggcagggcctgtgcggcgaaagcttcgttgagctcgaagaagtcgatgtcgttgatggtcaggcccgcgcgcttcaaggctttttgtgtggccggtactggaccatagcccatgattgccgggtccacacccgccaccgccatcgagcggatcacggccagcggctggatacccaggtcctgggcacgctgcgccgacatcacgatcatgcacgaggcgccgtcggtgatttgcgacgaagtaccggctgtcacggtgccgccctttggattgaaggcaggtttcaaggccgccaggctttccagggtggtgtccggacgaatggtctcgtcgtagtcgaacagtttcaggaacccgttctcgtcgtagccgttcatcgggatgatttcatccttgaacttgccttccacggtcgccttgtgggcgagttggtgggaacgcaggccgaacgcgtcttgggcttcgcgggtaatgccgtgcattttgccgagcatttctgcggtcaggcccatcatgcccgaggcttttgccgcgtacagcgacatgtgcgggttaggatcgacgccgtgcatcatgctgacgtggcccatgtgctccacgccaccgaccacgaacacatcaccgttgccggtcatgatcgcttgcgcagcggtgtgcagcgcgctcatcgacgaaccgcacaggcggctcacggtctggccggcagccgtgtgcgggatctgggtcatcagcgacgccatgcgcgcgatgttccaaccctgctccagggtttggttgacacagccccagatcacgtcttcgacttcgttcgggtcgaccttgacgttgcgttccagcagtttgctgatcaggtgcgccgacatgtcttcggcgcgggtgttgcggtgcatgccgcccttggagcggcccatcggcgtgcgaccgaagtcgacaatcacgacgtctcttggattcaagctcataaatattctcgctctagtcgtctgggcacttaaccgaagaagcgctggccagttttggccatctcgcgcagcttttcagtcgggtggtacagcgggcccaaatcagcgtatttgtcagccagggcaacgaactcagccacaccgatcgagtcgatgtaacgcagcgcaccaccacggaatggagggaaaccaataccgtacaccaggcccatatcggcttcggcggcggtttcgacgatgccgtcttccaggcaacgcacggtttccaggcacagggcgatcatcatccagttgatgatgtcttcgtccgacacctcacgctgttcgtagataaccggagccagcacttcgtgaaccgacgggtcggccactttcttctgcttgcccttcttgtcggcctcgtaggcgtagaagcccttgccattcttctggcccaggcgcttggcttcgtagagcgcgtcgatcgccgaacggcggtcgtctttcatgcggtccgggaagccttcagccatcacatcgcggccgtggtggcccgtgtcgatgccgaccacgtccatcaggtacgccgggcccattggccagccgaatttttccatgactttgtcgatgcgcacgaagtccacaccggcactgaccagcttggcgaaaccgccgaagtaggggaacagcacgcggttgaccaggaagcccgggcagtcgttaacgacaatcgggttcttgcccattttcttggcgtaggcaacggtggtggccacggccagttcgctggacttctcgccacggatcacttccaccagcggcatcatgtgcaccgggttgaagaagtgcatgccgacgaagttttccggacgcttcaaggccttggccagcagcgagatggaaatggtcgaggtgttggaggccaggatcgtgtcgtctttgacctgggcttccacttcggccagtacggcttgcttgaccttcgggttctcgacaaccgcttcgaccaccaggtcgacgtggccgaaatcgccgtaggacagcgtaggacgaatgccgttaagcacttcagccatcttcgcggcggtcatgcggcctttgtccacgcggccgaccagcagcttggcggcttccgccaggccttgctcgatgccgtgctcgttgatgtctttcatcaggatcggcgtgcctttggacgccgactgataagcgataccgccgcccatgataccggcgccgagtacggcagcctgtttcacatctttggcgatttcgtcgtaggccttggcctttttcttcaattcctgatcgttcaggaacaggccgatcaggctctgggcagcggaggttttcgccagtttgacgaaaccagcagcttccacttccagggctttgtcgcgaccgaagttcgcggccttctggatagtcttgatcgcttcaaccggcgccgggtagttcgggccggcctggccagccacgaaacctttggcggtttcgaacgacatcatttgctcgatggcgttgagcttgagtttttccagcttcggctgacgcttggccttgtagtcaaattcgccgctgatggcgcccttgatcaggttcagcgcggcttcggcaagtttttccggggcaactacagcatcgacagcaccgactttcagcgcgtcttcagcacggttttccttgccggcggcgatccactcgatggcgttgtcggcaccgatcaggcgcggcaagcgcacagtgccgccgaagcccgggtagatgcccagcttgacttcaggcagaccgattttggcagtggccgacatcacacggaagtctgccgccaggcacatttccaggcccccgcccagcgcgatgccattgatggcagccacggttggcacgttgaggtcttcgaaatcgctgaaaatcttgttggcttcgaggttgccggccacaagctctgcatcgggcagcttgaagttgtcgacgaattcggtgatgtcagcgccgacgatgaacacgtccttgccgctggagacgatcacgcccttgaccgaagcatctgctttgatggtgtctacggcctgacgcaattcattcagggttagacggttgaacttgttgacggactcacccttgaggtcgaacttcagttcgacgatgccactttcaagagccttaaccgtgatggctttaccttcgtaaatcatcaactgatctccacgatatggaagctgaacagtacacactggacgctggcctctggtttgacactgacgattgcgtcaatgctcaagccaatccgccaggcacacccgccaatgcgatagtcggggttatgtatgagcggtctgacagacaaacgctcaattcatacgcccgtttgatttgggtacgccaccttcatccaattccgggcaattgtcaatcgctcgaaaggctaggaaaaatgcgactttccagtcatttcagaaccccaaccctaggcccgcgactcatcaatattcaactattcatgaaatcaataatggaaaatttgtgggaaaaggctgtacagaatgggatatgccgctaggctagcgacaaccgtaacgcgccaggatgaacatccgacgcgggtaccacagatttaccggcctgcctggccaactccagcccgatgatgatgtcgggctttttattgcctggggttttatcgcaaaggcatcacgccagggctttgagcaatttatcaatgtcctgcaacacgctcacctcgcccttctcgccccaatacagggcgatcatttgcttgtcggcctcgaccttgtagacgttcgccggcagcgttgcaaaatgcggcaacaacttctcatccacgcacacttcgcgccattggttgacccacacgccgggttccagctgccaataactccagagggctggcgaactgccgcgccgtggccggcagtactgcgcgcaggggctcggcggctcctgcttgagccaatgcggccactcctggggcgacaattgcatggccaaaccgatgcggcgcgcctccatccgcaaggccatacgcccactctgatggcgcgacgggcgcagccatgccagggggctcagaaccaccagaaggattgacaccactatccagaccgtcatatgtgtactcccgaatttccagatgagcggatttgatctgacgcaaccccatccgcttgaaagcagccatactgaatttattgcagtcccctggaggaacgccccatgtcatacgaacatattctggtcgcggtagacctgaccgaagagtgcgatccagtgatcaagcgcgcccgcgctttcgccgtcgccagcaacgccaaactgtcgctggtacacatcgtcgagcccatggccatggcctttggcggcgacgttcccatggacctttcccagttgcagcaacaacagttcgaccaggccaaagagcgccttgacaagctgatcctcaaatatcctgaggtgaccaaggaaaactcccacctgacttacggccaaccacgccaggaaatccaccacctggccaaggaacagcattgcgacctgatcgtggtcggcagccatggccgccacggtttggcgctgttgctgggctcaaccgccaatgatgtgttgcacggcgcgccgtgtgatgtgctggcggtgaagctggtcaaagcccctcaagaccgatgaagatcaaatgtgggagctggcttgcctgcgataacagtgtgtcagtcgccagatgtatcaactggcagactgcaatcgcaggcaagccagctcccacaggttgatccgtatttcatataaaaaacccggtgttcatccaagtgaacaccgggttttttaatgctctggaatcactcaggcatccagctcggcccaacgctcaaccagcgcttccagctcctggttcaacgtttccagggacgcgataaccttggcagtttcagccgccgggcgcaggtagaagcccgcatcagccatgtccgcctctaaggcggcgatctgctgttccttggcgtcgatatcgcccggcaaggcttccagctcgcgctgcagcttgtagctgagctttttcttgttgctggtagccggcgcggcttcctgagccggtgcagcagcgaccggagccaccaccgccgacgtcaggtcggccttgccggacttgctctcggtcacgcccagcaggcgcggcgagccgccctggcgcagccagtcctgataaccaccgacgtactcgcgcaccttgccttcgccttcgaagaccagggtgctggtgaccacgttgtcgaggaatgcccggtcgtggctgaccatcagcacggtgccgttgaaggtcaacagcacctcttccagcagttccagggtttccacgtcgaggtcgttggtcggttcatcgagcaccagcaggttggccggcttgctgaacagcttggccagcagcaaacgcgcacgctcaccaccggacaaggccttcaccggcgtacgggcacgctgcgggctgaacaggaagtcacccaggtagctgagcacgtggcggctctggccgtcgatgtcgatgaagtcacgaccttcggcgacgttgtcgatcacggtcttttccaggtccaactgatggcgcaactggtcgaagtaggccacgtcgatcttggtgccctcttcgaccttgccttgggtcggctgcaggccattgagcatcagcttgagcaaggtggtcttgccggtgccgttggcgcccagcaggccgatacggtcgccgcgctgcaggaccatggagaagtccttgatcaggaacgggccgtccgggtgatggaagctgacgttttccagcaccatcacttgcttgcccgacttgtcggcggtatccagctggatattcgccttgccggtgcgctcacgacgctcgccacgctcaacgcgcagggctttcaatgcacgcacacggccttcgttacgggtgcgacgggccttgatgccctggcggatccagacttcttcctgggccagtttcttgtcgaacagcgcgttggcggtttcttcagccgccagcgcggcctctttgtgtaccaggaagctggcgtagtcgccgttccagtcgatcaggccgccacggtccagttcgaggatgcgcgtggccaggctctgcaggaaggcacggtcgtgcgtgatgaacagcacggcgccttggaagtccttgatggcctcttccagccaggcaatcgcgccgatgtccaagtggttggtcggttcgtcgagcagcagcaaatccggttcggaaaccagtgcctgggccagcagcacacgacggcgccagccgccggacaattcggcgagggtcttgtcaggtggcaactgcaggcggctcagggtgctgtcgaccagttgctgcaaacgccagccatcacgggcttcgaggtcctgctgaacgtgcatcagcttgttcaggtcttcctcggtgacgcagttctgcgccaggtgatggtattcggcgagcaacgcgccaacgccgtccaggccttcggcaaccacgtcgaacactgtccgtccgtcggccaccggcaattcttgcggcaattcgccgatcttcaggcccggggcgcgccagacagagccgtcatcgggcttctggtcgcctttgaccagcttcatcatgctcgacttgccggtaccgttacggccaatgatgcacacccgctcaccacgggcgatctgccaggacaccttgtccaacaacggcatagcgccgaaagcaagggacacatcgctgaatttgagcagggtcatacgtttctccaaaaaccgggcgcgcattctacctgagttgagggtgggatgcggccggcattttcttgactgacacgttctgtaggacatttactgggaacttcaaccagcgggccggcaaagctttcgccggccgccggcaaaaggctaagctaggggcaatcagtgtcggccgagccggcgctagtcgtgatttctctgcacggacgtctcatgcgcagtcgccttttcaactttttatcctgtctgcttctttccgccaccgccgttcaatccgcccaggccgtggacctcaccacccaacgtcaatattacgatgaagccaaacgcgccctcgccaaaggcgacagcggcccctacatgcaatacaacgcggccctggccgactacccgcttacgccctacctggcctatgacgagctgaccgcgcgcctgaaaaccgcgagcaacgaagaaatcgaacaattcctcgccaaaaacggtgacctgccccaggccaactggatgaagctgcgttggctgcgctggctggccgaccgtggcgactggcagacctttgaaaagtactacgatgccaagctcaatttcgtcgaactggactgcctgcacgctcagtaccagctcacccacaacctgaaagccgaaggctacaagaacaccgaaaaactctggcttaccggcaaatcccaaccggccgcctgtgacgcgaccttcggccaatgggccgccgatggccaactcaccgaacagaaaatctgggaccgcgccaagctcgcagccgaagcgcgcaactacgcgctggccaacagcctggtgaaaaccctgccgacgctcggcgcccagggccgcctgatggtggacgtggcgcagaaccccaacctgcttggcgacccgtcgcgctttctgccggccaacgaggccatgtcggatgccgtcggcctgggcctgcgccgcctggcacgccaggacccggacaaggccatggccctgctcgacggctatgccagcagcatgcacttttcccgtgacgaaaaagtgtcgattgcccgtgaaatcggcctgacgctggcacgccgctatgacccgcgcgccctcgacgtgatgacccagtacgacccggagctacgtgacaataccgtctccgaatggcgcctgcgcctgctgctgcgcctggcccgctgggaagatgcctaccagttgacccgcaagctcccacaggatctggcgaccaccaaccgctggcgctactggcaggcacgcagcctggaactggccgagccgaagaacccgcaagccctggtcctgtacaagaatgtggccaaggagcgtgatttctatggcttcctcgccgccgaccgctccaagtccccgtatcagctcaccaacaagccgctggtgatgagccaggcgttgatgaacaaggtgcgcaacacccccggcgtgcgccgcgccctggagttctatgcgcgtggccaggtggtggacggccgccgtgagtggtaccacgtcagccgccacttcaaccgcgatgaaatggtcgcccaggccaagctggcctacgacatgaagtggtacttcccggcgatccgcaccatcagtcaggcgcagtattgggatgacctggacattcggttcccgatggcccaccgcgacacgctggtgcgcgaggccaaggtgcgcggcctgcattcgagctgggtatttgccatcactcgccaggaaagcgcctttatggacgacgcccgctccggcgtcggcgccagcggcctgatgcaactgatgcccggcaccgccaaggaaactgcacgcaagttcagcattcccctggcttccccggcccaagtgctggacccggacaaaaacatccagctcggcgcggcctaccttagccaggtgcacagccagttcaacggcaaccgcgtgctcgcctccgccgcttacaacgcaggccccggccgcgtgcggcagtggttgcgcggcgccgatcacctgagtttcgacgtgtgggtggaaagcatcccgttcgacgaaacccgccagtatgtgcagaacgtgctgtcttattcagtgatctacgggcagaagctcaactcgccacagccgctggtggattggcatgaacgctattttgatgatcagtaaggttggctaaaggccctgtggtgagcgagcttgctcgctcaccacacaagctcgctcaccccatgaatctcactggccttcacgttcaccctcactgaactgcaacgccgccaaccgtgcatacaacgggttgctcgcaatcaactgctgatgcgtgcccactgccaccagcttgccctggtccatcaccgctatccggtcggcattcttcacggtggccagccggtgggcgatgaccagcgtggtgcgcccctgcatcaactgcggcagggcttgctggatcaaatgttcactctgcgcatccagggcactggtggcctcgtcgagcagcaggatcggcgcgtccaccagcaacgcgcgggcgatggccaggcgctggcgttggccgccggaaaggcccatgccgccatccccgaggtgggtctggtagccgtcaggcatttgcaggatgaaatcatgggcgtgggcaatgcgcgcggccgcttcgacctgctcgcgggtggcggacggattgccgtagcggatgttttcttcgacgctgccgaaaaacagcgccgggctctgggacaccagcgcgaaatggcggcgcaggtccatggggtcgagttcggtcagcggttggccttcgagcaggatccggccttgctgggggtcgtagaagcgcagcagcaagtcgaaaatcgttgatttaccggcgccggaagggcccaccagcgccagggtctcaccggggttgacggtcaggttcaaaccatcgatggcataactgtctggccgcgaggggtaggaaaaacgcaggtcttgcagctccatgcggccgctgacgcgctccggcagttgcacgcagcctgcggcaggcgcctggatttcgttactcgactgcaacagctcaccgatacgttcggcggcaccggcagcacgttgcaactcgccgagcacttcactcaaggtaccgacggcgctgccgacgatcaggctatagaacacgaacgccgccagctcaccgccggaaatccgcccgccaatcacgtccatgccaccgacccacaacatcacgcccacggcccccagcaccagcatgatcaccagggtaatcagccaggcacgctgcacaatgcgcttgcgtgccgtggcgaaagcgtcttccacggtgacggcgaagcgctgctcgtcctgcacttggtggttataggcctgtacggtcttgatctggccgagggtctcggaaacataactgccgacgtcggcaatgcggtcctggctcaagcgcgacaggctgcgcacccggcgcccgaatatcagaatcggcgccagtaccaacggcagcgccaccaccacaatgctggtgagcttggggttggtgacaaacagcaacacgatgccgccgatgaccatcaacgcattgcgcagaaacagtgacagtgacgaaccgatcaccgattgcaacagcgtggtgtcggtggtcagccgcgactggatttccgagctgcggttgttctcgtagaaacctgggtgcaggtagatcaggtggttgaagacctgccggcgaatgtccgccacgacgcgctcgccgatccacgacaccaggtaaaaccgcgcaaaggtacccacggccaggcctagcaccaacaccatgaacaggccgatggattggttgagcaggtgcggcgattgggtcatgaagccctggtcgaccagcaggcgaatcccctgccccatggacaaggtaatgccggcagtgacgatcagcgcaagcaaggcacccagcgcctgccagcgataaggcgcaacaaagcggctggcgagacggatcgcgcggcgttgacggactgaaaacatggagggcatcacctgatgaacgcagataggtacaccacaacattgggggaacttgagtaaataacaatgagtcaggttaattatgcccaccgatgctggcccctagaggctatcggtctaacgcctggctggaaatttgtatcggtttctggtgcactgggcgttcgaaccggtgactttgtaaggagttgtaatagcttggtcacgcgggggaattacagtaggtacacaacctgatgaggagacaggccatgaccttgcacaccagcagcactgacaaagtagaagtcatccgcaaagagcatcaagcccatctcggttgctcgatcatcgatgcccaagggcgcgaagtgccgattactgaagacatgatccagcaggcatgccgcgagctggaacagcgactggtcaaacctgccaagcaaggctgaagcgcccacgctctttcaaacccggcctttgtggccgggttttttattgcctgcttatagcgtgactgcgcccaatgccgacacgatgcccgataacacctgcgactcgccattgatgcgtaccttgaggccatcaatctcacggcgctcagggtaatgcttgcgcagcaggtcgaaagccttgcgctgttcttccacacttcccacaaggctgcgacggaaatccgcatcgtcccggcgcgggtcgtacacgctgcggcacaaggtcgccagggcccaggccggatcggtggatgcattcaaatgcacttcggccagccacggttgcggcaacaaatcgctcaattgaatgctggcttcctgcccaaggtgcgcacagaacgcctgatagatctgcgccgtgccgcgctgcttgccatccaggctgtaacccgcgatatgcggcgtggccagcacgcacagatcagccaggtcggcatccacttgcggctcgccttcccacacatccagcaccgcttgcaggtcttcgcgcgccagcaacacctcacgcaaggcggcattgtccaccaccgggccacggctggcgttgatcaaccaggtgccgggcttgaggctgttaaggcgttgacggtcgaacaggtgccaggtggagccattgccggatttggtcagtggcgtgtgcaggctgatcacgtcgcactgttcaatgatctgctccaggctcacgtagtcgccgtcttctgcgatctggcgcggcgggtcgcataccagcacgttccagcccaggcccttgagcaccttgaccaggcgcccgcccacctcaccggcgcccacgacgccgtaagtgcgccggttcaggtcggcgccttcgatttcggccagggtctgcaggctgcccagcacataatccaccacgccacgggcgttgcagcctggcgcgctggaccattgaatgccggcctgcttgaagtaatccaggtccaggtgatcggtgccaatggtgcaagtccccacaaaacgcactttcgtgccgtccagcaaagcgcggttcacattggtcaccgagcgcaccagcagcacatccgcctgctcgaccgtggcacggtcgatggaacggccgggcacccggcgaatctcgccaaacccttcgaagaatgcatcgagcagcgggatattttcgtcggcaacaatcaacatggcaggctcctttcgcggactcgcagtgtacaggtgtgggagctggcttgcctgcgatgctgacacctcggtctatcagctgtaccgagctgatgctatcgcaggcaagccagctcccacacaagccggccccacagggggtcagcgtctgcgagagaggcgcttacaaatcgctaacacaggttttttcctgaccactgcgtcaacgcgtagacttcgccgtcctttgcaacacttttactggacactcgcacgtgaacatcgccacccccgccctctcccgccccgcccgtgtcagccgcgaggtgcgcagcctgttgagcctggccctgccgatcatgatcgggcaactggcgaccaccgccatgggctttgtcgatgcggtgatggccgggcgcgtgagccctcgggacctggcggctgtggccctgggcaactcgatctggattccggtgtatctgttaatgaccggcacgctgctggccaccacgccgaaagttgcccagcgcttcggtgccggccagcacaccgacattggcccgctggtgcgccaatccttatggctggcagtgatggttggcctgacggcgctgctgatgctgatcagcgccgaaccgatcctgcacgcgatgaacgtcgaccccgaactgatcaaaccctgcatggcctacctgcatggcattgcctccggcatgccggccatcgccctgtattacgtgctgcgctgcttcagcgatggcctggggcgcacgcggccgagcatggtcatgggcttgtgcgggctggcgttgaatattccgctgaactacgtgttcatctatggccacttcggcgtgccggccatgggtggcgtaggttgtggctgggccacggccatcgtgatgtgggtgatgatgctcggcctggccgcgtggacccgctgggcaccggtttatcaaagcagcgagttgttcaagcgtttcgactggccgcaatgggcagtgatcaagcgcgtactgagcatcggtttaccgattgggatcgcggtgttcgccgagtcgagcatcttcgcggtgatcgccctgttgatcggcagcctgggggccaacgtggtggccggccaccagatcgcactgaatttcagctcgctggtgttcatgatcccctactccctgagcatggcggtcaccgtacgcgtcggccaggcgctgggccgtggcgaaccgcgtgaagcgcgctttgccgccggggtcggcatgggcactgcactgacctacgcctgcctgtcgtgcagcctgatgctgctgtttcgcgaacagatcgccgccatctacacacccgacccgctggtgatccacgtcgcctcgatgctgatcgtgtttgccgcgctgttccagttctccgacgcgatccaggtcactgccgccggcgccctgcggggttaccaggacacacgggtgaccatggtgctgacgctgtttgcgtattggggtgtcgggttgccggtgggctacgccctggggctgaccgaatggctgggcgccgccagcgggccaagtggcctgtggcaagggctgattgtgggcttgagctgcgcggcggcgatgctggtgatccgcctggcacgcagtgcgcgccggcggattcgcctggcttaagcagacttcttgcgaatccagtacaggtacgtaccggcctgctcctgttgatccaccagttcgtggtcgagaaacacacagaacttggggatatcgcggcgggtcgaggggtcggtcgcgatcaccttgagcaagccgccgggcggcaggtcgcggatgtgctggtgcagcatcatcaccggttcggggcagttgaggccggtggcgtcgagggtggcgtcgacaggtagatcaatactcattagtcactcctgaaacagacccgctcttctgtgggagcgggcttgcccgcgatgacgggggcacattcaacatagatttcgactgttataccgctatcgcgggcaagcccgctcccacatttgatatcagtgttttttgggtttctttacgtctaccaaccggcgcaaatgacacgtcacttcctcacggtcgtgatacagctgcttgcacccaatctctacgcgaataccccgcgctttgaagccttcctcaatacgctccagcaaacgcttcacctcggcgtaacgctgcttcatcggcagtttcaggttcaccaccgcctcgcggcaatgcccttcgccgatccaggtttcaagcagggcggcgttgcgcgcgggcttctcgacgatgtcacacaccatccagtccaccggctgcttgggcacgaaggtaaagccgtcggccatcaagtgctgcaccaggccggtgtccatcaggctttcggccatggggccgttgtcgatggcggtcaccagcatgccacggttgaccagctgccaggtccagccaccgggggctgcgccgaggtcaacgccggtcatgtcgccatgcaggcgctcgtcccactggtcgcgggggatgaagtggtgccaggcctcttcaagcttgagggtcgagcggctaggcgcgtcacgcggaaacttgaggcgcgggatgcccatcggccacatcgccgagttgcccgactcggccaggcccatgaacacttcacggccacttttgaaggtcagcagcaggcgcggcttgctcgggtcgtccaccagtttgccagcgttgagcaaggccttgcgcaggtgcacttcgaatttcttgcagaaattcgacagttccttgccgtcgttggtgtcgaccatttccagccacaggctgccgcacaccggaaattcgcgcaggtgggcgaggatcacgctgatgcggtcggtttccggcaggtcgatgaacaccccgcgcgcccactgccgcgggaagatcagctcggcaaagcgctggccgtgcatcaggcgctgggcgccatcttcttcagtgcagacaaattcggcgcaggcgctgccggtcttggctttggcgtagccggatacgttcaggcgcgcggcgtgttccgcgatctcggaacagacttcgccttcaaaacccgggcggcagtgcataaaaagggtgttcatcaactctccaagtgaatcaaccggccttgcgctgtcgcaatgcctgtcatgaaaacccgcgcatgataacggagttcggaaccttggacttaacgatagagtccagttattagcctgctaatgaaaacagggctaagttaaaagctctgttcgtcccgtcaggtccgtagccgtgcggaccataaggagtcatgtaatgtcatccgttgatagcctgagaacccttaaaacactggaaatagacagcaagacctaccactacttcagcttgcccgaagccgccaagagcctgggtgacctgggcaagctgccgatgtcgctcaaggtgctgctggaaaacctgctgcgctgggaagacaacaagaccgtcaccggcgccgacctcaaggccattgcggcctggctcaaagagcgccagtccgaccgtgagatccagtaccgccccgctcgcgtgctgatgcaagactttaccggcgtacccgccgtggtcgacctggccgccatgcgcgccgccgtggccaaggccggtggcgacccgcagcgcatcaacccgctgtcgccggtggacctggtgattgaccactcggtgatggtcgacaagttcggcaatgctgacgccttcgagcaaaacgtcgacatcgaaatgcagcgcaacggcgaacgctacgccttcctgcgctggggccagagcgctttcgacaacttcagcgtggtgccaccgggcaccggcatctgccaccaggtcaacctggaatacctgggccgcaccgtctggacaaaagacgaagacggccgcacctacgccttccccgacaccctggtcggcaccgactcccacaccaccatgatcaatggcctcggcgttctgggctggggcgtgggcgggatcgaagccgaagcggcgatgctcggccagccggtgtcgatgctgatcccggaagtgatcggcttcaaactcaccggcaaattaaaagagggcatcaccgccaccgacttggtgctgacggtaacccagatgctgcgcaagaaaggtgtggtgggtaaattcgtcgaattttacggcgacggcctggccgacctgccgttggctgaccgcgcgactatcgccaacatggccccggaatacggcgccacgtgcggctttttcccggtggatgacgtcaccttggactatctgcgcctgtccggccgccctgccgacaccgtcaaactggtggaggcctacaccaaggcccagggcctgtggcgcaacgccggccaggagccggtgttcaccgacaccctggcgctggacatgggcagcgtcgaagccagcctcgccggccccaaacgcccacaggaccgcgtggccctgccaaacgtcggccaggcgttcagcgactttctcgacctgcaattcaaaccgaccaacaaagaagaaggccgcctggaaagtgaaggcggtggcggcgtcgccgtgggcaatgccgatttggtgggcgaaaccgactacgaatatgacggccacacctatcgcctgaaaaacggcgccgtggtgattgcggccattacctcctgcaccaacacctccaaccccagcgtaatgatggcggcggggctggtggcgaaaaaggccgtggaaaaaggcctcacccgcaaaccttgggtgaagacttccctggcgcctggctccaaagtggtcaccgactactacaaggcggcgggcctgacccaatacctcgacaagctcggcttcgacctcgttggctacggctgcaccacgtgtatcggcaactcggggccgctgcccgagccgatcgaaaaagccatccagaaagccgacctcgccgtcgcctcggtgctgtccggcaaccgtaacttcgagggccgcgtgcacccgctggtgaaaaccaactggctggcctcgccgccgctggtcgtcgcgtatgccctggcaggcacggtgcgtatcgacatcagcagcgagccactgggtaacgatcaagacggcaagccggtgtacctcaaagacatctggccaagcagcaaagagattgccgacgccgtagcccaggtcagcaccggcatgttccacaaggaatacgccgaggtgtttgccggtgacgaacagtggcaggccattgaagtgccccaagctgccacctatgtgtggcagaaggattccacctacatccagcacccgccgttctttgacgatatttccgggccgttgccggaaatcaaggacgtcaaaggcgccagcgtactggccttgctgggcgattcggtgaccaccgaccacatctcccccgccggcaatatcaagaccgacagccccgccgggcgctacttgcgcgagcaaggcgtggaaccgcgtgacttcaactcttacggctcacgccggggcaaccatgaagtgatgatgcgcggcacctttgccaacatccggatccgcaatgaaatgctcggcggtgaagaaggcggcaacacgctctatatcccgaccggtgaaaaaatgccgatctacgacgccgccatgaaataccaggcctcgggcacgccgctggtggtcattgccgggcaagaatacggcacgggctcgagccgcgactgggcggccaagggcaccaacctgctgggcgtgaaggcggtgatcgccgagagcttcgagcggatccaccggtccaacctggtgggtatgggcgtgctgcccttgcagttcaagctggatcagaaccgcaaggcgctcaagctgaccggcaaggagaagatcgacatcctggggctgaccgatgccgagattgagccacggatgaacctgacgctggtgattacgcgggaggatggcagcagcgagaaggttgaggtgctgtgccggattgatacgttgaacgaggtggagtacttcaaggcgggggggattttgcactatgtcctgcgccagttgatcgcatcttaagcaacgctgcaaatcaaatgtgggagctggcttgcctgcgatagcggtgggtcagctaatcaaatgttgactggcctgccgccatcgcaggcaagccagctcccacagttttgaccgtgtttcaaatcagccgaacaaccacttccacagcagtatcagaaccacaaccgccaacaccggccgcgcaatgcggtacgccttcggatgcttgcgcttccactgtttgaccttgccactgaacttgtcgctgaacgtcttgctccacgcatacgcctggttgattccgccaacgcgctcgtcgtccaggttttgcggcgccgtcgcgcggcccagctgcttgctgacccaacggttaacgcgggtcatcaggcggttgctcaacggacgctcgatgtcgcagaagagaatcacacgagtgtgttcggtctcgttcttcacccagtgcacgtaggtttcgtcgaacatcacgtcttcgccgtcacgccaggcataaacctggccatcaacaaagattcggcaatcgtcggagttcggcgtggacaaccccaggtgataacgcagggaaccggcaaacgggtcgcggtgcgggttgaggtggctgccgcccggcaacagcgcgaacatcgcacctttcacgttgggaatgctgctgaccaatgccacggttttcgggcacagcgcctcggccgacggcagcggtttgtcgtaccacttgaggtagaagcgcttccagcccttcttgaagaacgaaccaaaaccggcgtcgttgttcttttcggcggcgcggatgtaaccctcgtcgaacaggtgcatggcctcttcgcggatcacttcccagttgtccttgagcacatccagttccgggaacttgctgcggtccaggtacggcttggacggcacggcggaaaacaggtacatcaaggcgttatacggggcgaacagcgccgaatggttgacgaactggcgcaacaccggcaaacgcgccttgccgcgcaaatgcacatacagaatgctgccgataaacagcagcaacaccgacagtttggcggccaaagaaaaggtcatgcagcaactcctgaaaatatgcgcctggccaacagcagacgtagcagccggccatgataaacacttgggccattatgcagaaggcccaggccgaccggctgacttacatcaagcctggttttcctgctcggtaaacaaatcgctgaacagcatgctcgacaggtagcgttcaccggagtccggcaggatcaccacaatggtcttgccctgcatttccggcttctcggccaggcgcaccgccacggccatcgcggcgccgcaggagatgccgcacaaaatcccctcttcctgcatcaaacgcagggccatggccttggattcgtcgtcagtcaccagctcaacgcggtccaccatcgacaaatcgaggtttttcggcacaaagccggcgccaatcccctggatcttgtgcgggctcggcttgatttcttcaccggccaacgcctgggtgatcaccggcgatacgatcggctcaacggccaccgacagaatcggcttgcccgcaatatttttgatatagcgcgacaccccggtgatggtgccgccggtgcccacgcccgccaccagcacgtctaccgcgccgtcggtgtcgttccagatttccgggccggtggttttctcgtggatcgccgggttggccgggttttcgaactgggccggcatgaagtactggctcgggtcactggcaacgatttcaccggctttctcgatggcgcctttcatgcctttggcaggctcagtcagcaccagttcggcgcccaaggccttgagcactttacgtcgctcgatgctcatggacgccggcatggtcagcagcagcttgtagccccgcgcggcggcgacaaacgccaggccaatcccggtgttgcccgacgtcggttcgacaatggtcatgcccggtttgagtttgccgctgctttcggcgtcccagatcatgtttgcgccaatgcggcacttcaccgagtaacccgggttgcgcccttcgatcttggccaggatggtcacgccgcgcggggcaatgcggttgatctgaaccaggggcgtgttaccgatggagtgcgcgttgtctgcaaaaatgcggctcatgacgggtccttaaggcgatttcaagaaggccccaagggtatgcctcaggcctttgggcgtccagtcagaggaacgttgcgcccgcgcctgcggtccatcgcctataccgttggagagcattgacatgaaacgtcgctacagtgggctgctatggatcgtcgccgtactggtggtattgctgatcgccctggacctggccctgccctatctggtgcgcaattacctgaacgacaaactcgccgacatgggcgactaccggggccaggtcacggacgtggacgtggccctgtggcgcggcgcgtaccgcatcaacggcctgaaaatcgtcaaggtcgacggcaaggtaccggtaccgttcgtcaatgcgccattgattgaatttgctgtcagctggcactccctgtggtacgaccacgccgtggttgccgaaggccatttcgtaaggcctgaaatcaacttcgtcgacggcggcgccaacaaacaggcgtcccagacgggtaaaggcacggattggcagcaacaactgaaaaaactattgccgatcacgctcaatgaagtgcgcatcgaagacggcaagatcgcctttcacaacttcagctccaaaccagtggtgaatataagggccactgaggtcaacgccagcttctacaacctgacgaacgtggtggacctcaagggcagacgcgatgcacggttcgagggcaaagccctgcttcaaggccaggcgccactggaagctaccgccacttttgacccgttgaatgacttcgaagatttcgaattccgtttccgtgcccgggacctggagctcaaacgcatgaacgacttcgcttcggcctatggcaagttcgacttcaaggccggtacgggcgacgtggtgattgaagcgcaggccgagaaaggccagctcaccggttacatcaagccgctgctgcgcaatgttgaagtgttcgactggcagcaggacgtcgagaacaaagataaaaatatctttcgctcaatctgggaagccgtcgtcggcgccagcgaaaccgtgctgaaaaaccagaacaaaaaccagtttgccacccgggtggaactcagtggcagcgtgcaccagcaaaatatcagcgcgttctccgcatttctggcgattttgcgtaatggtttcatccaggcctttaatgcgcgctatgaacagccaaagcctagcgcggactaaaatgtgtgaccggccattcagagactgaataacccgtctgcgttcacagtcgccggggctgcgcggtatagtcgggcattgctgattttcgaggaatgaccgatgaagttcgaaggcacccaggcctatgtggctaccgatgacctgaaactggccgtcaacgccgccattaccctggagcggcctttgctggtcaagggcgaaccgggcaccggcaagaccatgctggccgagcaattggccgaatcctttggcgccaagctgatcacttggcacatcaaatccaccaccaaggcccatcaaggcctctacgagtacgacgcggtcagccgcctgcgcgactcgcagctaggcgtggacaaagtgcacgacgtgcgcaactaccttaagaaaggcaagctctgggaggcgttcgagtccgaagagcgggtgattctgctgatcgatgaaatcgacaaggccgacatcgaattccccaacgacctgctgcaagaactcgacaagatggagttctacgtctacgaaatcgacgagaccatcaaagcgaaaaaacgcccgatcatcatcattacctccaacaacgaaaaagaactgccggacgccttcctgcgccgctgcttcttccattacatcgccttccccgaccgcactaccctgcaaaaaatcgtcgatgtgcactaccccgacatcaagaaagacctggtcagcgaagcgctggacgtgttcttcgatgtgcgcaaagtcccgggcctgaagaaaaagccgtccacctccgaactggtcgactggctcaagttgctgatggccgacaacatcggcgaagccgtgctgcgcgagcgcgacccgaccaaggcgattccgccgctggccggcgccttggtgaagaacgagcaagacgtgcagttgctggagcgtctggcgttcatgagccgtcgcggtaaccgctgatgctgctcaacctgttcaatgaaatgcgcgccgccaaggtgccggtgtcggtgcgcgagctgctcgacctgatcaacgcgttgaaacagcgcgtgaccttcgccgacatggacgagttttattacttggcccgggcgatcctggtcaaggacgaacggcacttcgacaagttcgaccgggcgttcggcgcctacttcaatggcctggaaaagctcgacgaccacctgcaggcgctgatccccgaggagtggctgcgcaaggagttcgaacgttcgctgacggacgaggaacgcgcgcagatccagtccctcggcggcctcgacaaactgatcgaggaattcaagaagcgcctggaagaacagaaagaacgtcacgccggcggcaacaagtggatcggcaccggcggcaccagcccgtttggttccggtggctataacccggaaggcattcgcgtcggcgatgcgggcaagcgtcagggcaaggcggtgaaagtctgggaccagcgcgagtacaagaacctggatgatcaggtggaactgggcacgcgcaacatcaagatcgccctgcgccgcctgcgcaaatttgcgcgccagggtgcggctgaagagctggacatcgacggcaccatcgaccacaccgcccgcgacgccgggctgctaaacatccagatgcgcccggaacggcgcaacaccatcaagctgttgctgctgttcgatatcggcggctcgatggacgcccatgtgaagatctgcgaagagctgttctcggcctgcaaaaccgagttcaagcatttggagtatttctacttccacaacttcgtgtacgaatcggtgtggaagaacaaccagcgccgcacatcggaacgcacctcgactcaggatttgctgcacaaatacggcgccgattacaaagtgatctttattggtgatgcgtcgatggcgccctatgaaatcacccaggcgggcggcagtgtggagcactggaacgaggaacctggctatgtgtggatgcagcgtttcatggccaagtacaagaagctgatctggattaacccgtacccgaaggacacctgggggtatacggcgtcgacggggattgtgcgggagttggtggaggatcagatgtatccgctgacgttgcgcggattggaagaagggatgcgcttcctttccaaataagtggtgcggctactgacgccatcgcaggcaagccagctcccacagttaactgcatttcaacgttggaatgcggtcaactgtgggagctggcttgcctgcgatgcttttagctgttcaaaaatcgctgcaggaaatcaatgtgctgccggtgcgccgtttcctgcaccaccggcgccaacctcaccttttcccccggcaaacactgcgccagccgcgccagcgccaagggagtcaatgcacccaaacgcggatacccaccaatcgtctgccggtcattgagcaatacaatcggctgcccgtccggcggcacctggatcgcccccaacggaattccttcggaaatcaatgaaggcccctggtattgcaacggcgtgccgagcaaacgcatgcccatgcggtcggcgcgactgtccagcgcccactcggtgttgaacgcatcgaacaggctttggccgctgaactggccaatctgcgcgccgacgatcacgtccaatggcgccttggccggcaaatccggcgtactcaatactttcatcgccccgcccaccccggaatacgccaggcgcccgccttcggccaacgccttgccaaaaccctccaccccacccagttcctcgcggaccaccgtggcacaactgcccagcacgtgcggcgcatcgaacccgcccggcgccgccaggtaggcccgcgcaccgttgaacggctgggtaaagcgcaaacgctggcccttttgcaggataaaactgcgccccgggctgatggctcgctcgtcgatgtacgcgcccaggtccgcaccggccagcgccagcaaacaatagtcctcggcctgcacggtaaagccgcccagggtgatttccaccaccggcgcatccagcgcattgcccagcagccagttggcccaggacatcgacacccaatccagcgcgccgccctgggtcacgcccaaatggcgcacgccgaaacgcccggcgtcctgcagcaggcatagcggcgtgctggcctcgatgatcaagcggctcatgcctgcgcctccaacggcgtgtcatcgccacctgatttgatgaattcagcgtgatcgacgggttcgaagcgcacggtgtcgccgggttgcatcaggctgtagccgtcgcgctcgcggtcgaagagtttggccggggtgcggccgatcaggttccagccgcccggcgacaccaccgggtaagcggcggtttgccgctcggcgatgccgacgctgccggccgccacgcgtttgcgcggcgtattgaggcgaggcgtggcgaggcgttcatccaccagccccatgaaagcaaagcccggcgcaaaaccgagggcgaacacctggtattcatgggcgctgtgacggcggatcacgtcgtctaccgacagcccgctgcgctggctgagcagcgtcagctcggggccgacactcaggtcgtaccacaccggcagcacatggcactggccgctgccctgcgcctggggttgcaggtcggtcagcgcctgctcgatcagctcgcgggcctgggccgggctcagagccgtgaggtcgtaatgcaccatcaacgtggtgtaggacggcaccagatccaccagcgccgcgccgaaaccttcacgcaaacgccgggtggcggcgagcatccatggcatgttggcttcggcgatcacctcaaacagacgcaccatcaagcagtcgatggccaccacttcaatccgtgccttcatgctggcttcaacgcctcgcgaatgcgctgcacggcggcaatcgaactggcgttgtcgccgtgtacacacagggtgttggcctgcagcagcaaggcgctgccgtcgctggcagtcagcggttccccacgggaaatggtcagcgcttgttgcacgatggtgtcggcgtcgtggtgcacggcgcccggcaactgccgggacaccaggtggcccttggcatcgtaagcgcggtcggcgaaggcttcgaaccacaggctgacgccgtactcatcgcccaatgcttgcgcggcgctgttatcgcgggtggccagcagcatcaatggcaggtcgccataagccgcaacagcctggatcactgcacgcaattgcgccgggttggccatcatgtcgttgtacatcgcgccgtggggtttgacataactgacccgcatcccttgggcgcggcaaatgccgtcgagggcgccgacctggtagtgcagcaggtcctggatttcctggggcgtgtagttcatggagcggcggccgaagccttgcaggtcctgatacgccgggtgcgcccccacttgcacgccgtgcttgagggccaggctgacggtcttgcgcatgatgctcgggtcgccggcatgaaagccgcaggccacattggcgcaatcgatgaacggcatgacctcggcgtccagacccattgtccagttaccaaagctttcgccaatatcgcaattcaatagcagacggctcacggcgggtgctcctgtaggctttatagtttttgtagtgtgggatttttcatacagaactcgcaacttgtcctgacaccccaacgacgcttatcgtggaatagctcgatttttggcgctggcccggtacggcgtccaactaataaaaaccgatccatgcataagaaaaagttgatcccatgaatttgaagttcctcgaaaccttcgtctgggtggccaagctcaagagctttcgcctgaccgccgagaagctgttcaccactcaggcgtcgatctccagccgtatcgccgtgctcgaaagcgagttgggcgtgaagctgtttctgcgcgactcacgcggcgtgagcctgaccccggaaggcttgaaggtgctcgattacgctgagcagatgatggtgaccatgcagggtttgaagcagtccctggaaaccaccagcagcaaggtcgggcgcatccgcatcggcgccatggacacggtcatccacacttggctgagctccttcgtggcggaactgatggaccatttcccgctggtggaaatcgaattggtcgccgataccgcactgaacctcagcgatcaactgcaaaaaggctttctcgacctgatcctgcaaaccgacctgctgcgcctcgaaaccgtacgcagccaggaattgtgcagccaccccatggcctggatcgtcgccagccattcgatctacaaccgtgactacgcctccctcgccgaactcgcccaggaacgcatcatcacctactcgaaaaactcccacccgcaccaggatgtgctgagcctgatgcaagccaacggcgtggcggcgccgcgcatgaactgtgtgaattcggtgtcggcgattacccggttgctgcgcgatggcttcgggattggcgcactgccgccggtactggtcagcgaggaattggcgcgcggggaattggtgatgttgccgatggcgcagaaactgccgaatctgcaggtggtggtgtcgtggcgcgtgggagtggaattggtggaggagattgtggggctgtgccagaaggtggtggcgcggtatgccgaagaggtcggtgaagagcggatgctactggcaaaacccgattaaaaactgtgggagctggcttgcctgcgatagcggtcgatcagttacagatattcaagctgactcaccgctatcgcaggcaagccagctcccacatttggatcgatgtacggcttagagacctttgaggtcgcgctcttcgatgggccggctctggcgcaaacgcttgccgcccagcaccacccagtcgatcaagcggaacaggcattccagcccgaacgacaacagcatcgccccgcccaacccccagcccatggcttcaggcgtcagcagaatctggtagctgtaaccgttccaggtttcccggcggatgtccgggtcggccgccaccgccacttgcagcacgcggatgtaccacgggccctgcatggcctggaattgcttgtccagcgccacttggcgatccagcaaagtgccgaggctgttggcatcgctgcgaaacaccgggtcatcgctggcgcggtagtgcgccaccagcgcctgcaaatcaccgttgaagaactgctgcgccgtggcgtcaaagccgcgcaggccggtttgggcctcgatcaaatgggcttcgacgcgcttggcgtagtcgttgataaaccccggcacttgcacgccgaccaacaagccaatggcaaacagcaccaaccgcaggtaactgagcaacatggtcgatatccttactcggtgacgccctggctgacgcattcaccgcgtcgccacaggctccattggcccggttcgtagcgggtccagttttcgttgtcggtcaagggttcggtggcgatcaccgtcaccacgtcattgggggtagtttcggcctgaaaatcgacgatcacgtcgacatctttcagccgcgccgggccaaacggtgcgcgccgggtgatttgcgcgagcttggtcgagcaatagcagaacagccagtcgccgtcactgagcatgcagttgaacacgcctttgctgcggtattccgagcaggcagcgatcaagtccggcaacacttgctcgatctccaccggctccggaaaggcttcacgcacgcggttaagcaggtcgcagaacgccgcttcgctgtcggtatcgccaaccgggcggtagaaggtcgcgcgggggttgaagtcggccaactggccgttgtgggcgaaacaccaattgcgcccccacagctcacgcacgaacgggtgggtattggccaggctgaccttgccgacgttggcctggcggatatggccgatcaccacttcacttttgatggggtaacgctgtaccagcaacgcgacttccgactcgctgctggccgccgggtcctggaacaagcgcaggccacggccttcgtaaaacgcgatgccccaaccgtcgcggtgggggccggtacgcccgccccgctgcatcagtccggtaaagctgaacacgatatcggtggggacgttggcactcatgcccaataattcacacatgccagggctctcgctgcagggcgtacaacgttaaagacgcggttcgacccgccgaccgctgaccggtgccggccgacgcaaaggctcgtcgtcctccaccggctcggcggccagggccgcgtcgtttgcggccttgcgctcgcgacgggcgttggcggcgcgctcgatgggccagcggatcaacacgaacacgacatacacggcgagcgcgatcatcgtgtacatgaacaaatcagagatggcccgccaggcgttattgcccacatgcagcaccaggtccagcgccgtgatcgccacggccggtgcgaactgcgtcttgaccgggtcgacgatggtcgggctgaacaacagcaccgccatcaacaactgcagcggctcgcgcagccagcgccagatccagcgggtcatgcgccaccataccaacaggcagcccaaagcggcgaaggcgtaaaggccccaagcgatcagatagtcgttctcggtcatggtgtccatggcaaggctggcaaagaggcggctatgataacggcttttgcgtgtcgcggctgcaatgcctgcggcaaaccgccagacagagagggatccatgcctacatcgaccgctccgattgcccacaaggccccaggccaggatccgtacgcttggctgcaagaacgtgatagcagcgaggtgctggattacctcaaggcggaaaacgcctggcaggaagcgcaactcgccgatcagcaggcgctgcgtgagaccctgttcgaggaaatcaaaggccgcatcctcgaaaccgacctgtccctgccctcaccgtggggcccgtacctgtattacacacgtaccactgccggtgacgaatacgcccgccactaccgctgccgccgcccggcggatgacagccatgccgtggacgaaagcagtgaagaactgctgctggacccgaacgtgctggccaatggcgggtttttctccctcggcgcgttcagcatcagccccgaccaccagcgcctggcctacagcctcgacaccagcggtgacgagatctacaccctgtacgtgaaggaattggccaccggtaaggtcagcgaactggagttcgaggactgcgacggcagcatgacctgggccaatgacagcctgaccctgttctttggtgagctggacgatacccatcgcccgcacaagctttatcgctaccgcctcgatggcacggcggcgcaggaagtgttccacgagcctgacggccgattcttcctgcattgctaccgttccagctccgagcgccagttgctgctggcgttgggcagcaagaccaccagcgaaatctgggcgctggccgccgaccagccgcagcaagacttcacctgcctggcgccacgggtcgaggaccatgaatacgatgtggaccacggcgcgctcaacggcgagtggacctggtttatccgcagcaaccgcgacggcatcaactacgcgctgttcgtcgcgccggacaccggcagcgtgccgaccgaagatcagtggcagaacctgatcccccacagcgatgaggtgatgcttgacggcgtgagcctcaacgtcggcgccatgaccctgagcctgcgcatcggcggcctgccggtgattgaagtgcacccgcaggatgtaccggcttatcgcgtggaactgcctgacgccgcctacagcctctatgtacagaacagcctggaatttgtcagcgacaagatccgcctgcgctacgaagccctgaaccgcccggcccaagtgcgtcagcttgagctggcgacaggcgcgcaggtcgtgctcaaggaaaccccggtgctcggcgtgttcaatgccgacgactacgtgagccagcgcctgtgggccacttccgccgatggcacccaagtgccgatcagcctggtggtcaaacgcgaccaactcggcaaaccgacgccgctgtacctctacggctacggcgcctatggccacagcctcgacccgtggttctcccacgcacgcctgagcctgctggaccggggcgtggcgtttgccatcgcccacgtgcgcggcggcggcgaactgggcgaagcctggtaccgcaacggcaagcaggagcacaaacaaaacacgttcagcgactttatcgcctgcgccgaacacttgatcgccgagggcctgactacttcaaaacaactggcgatcagcggcggcagcgccggcggcctgttgatcggcgccgtgctcaaccagcgcccgcagctgttccaggcagcgattgcagaagtaccgtttgtcgacgtgctcaacaccatgctcgacccggaactgccgctgaccatcaccgagtacgacgagtggggcaaccccgaagagcccgaggtgtatgaacgcatcaaggcctacgcgccgtatgaaaacgtcagcgcccaggcttacccgaacctgctggtaatcgccggttacaacgacagccgcgtgcagtactgggaggcggccaaatgggtggccaaattgcgtgacaccaaaaccgacgacaacctgctgttgctcaagaccgaactcggcgctggccatggcggaatgagcggtcgttaccagggattacgtgacgtagcactcgaatatggatttgtgttcaaggcccttggcctgatttaggaactaagtgcggcggttttgtctgaacacagaaccgccctactggattgatggaccaagattgccgccatgccactaccgactttgatgaacaacgaaatccgcgacatgctcatggattgcggtttgttcgaccccctgttgccggaagactttcacgtcgccgccggctacttcaacatcagcagcattgcccgcgatgaggtgattttcctcgagggcgacgcgggcaccttcatgtgcatcatccacagtggccaggtggcggtgcaaaaaaccaaccacgaaggccagcgcctgaccatcgccaccctgcgcagcggccgggcgtttggcgaaatggcggtgctcgatggcgagcggcgctcagccagttgtgtggcggccagtgactgcgtgctgttgaacctgggcaaggactccctggaaaaaatgctcaacgaggcgccacgggtggccgccaagatcatccgcgccatcgcgattgccctgtccaaacgcctgcgcatggccgacgggcaactgctatcccaacagttttaaccgcccggagttttcggtttgctgtcgttttgcagcaggccgggcaccgtttgatccttcggcggagttggcaacacgatcggcaccagcgccggtgagccgttagccgtggccttgggtgcgacgggcggggtgacttgcgggtacaacgtcggcgtcggcgtacccggtgcaccgggggttggcgcgggtgcgaccggcacggtttgcacctcttgagcctgcgccgtacccaatgcgagcgcgccgagcacaatgaccgttagaatgctgcacttcatcgatggctccatggcctgaccggaatgtcgtaaggctactcccaaccgcgcaagaatgcccttcccaatgagatttccatgaaacgtttcgttctgctggacaccaccccgatccccgacaacggcggtgccctgtgcctgttcgaatacggtgaggattttgtcatcaagattcagggcggcgacggcggccagttgatgaacacgcgcatgcacggttccgaagacgcgctggccgaaatcccctgccgcaaggttgccgggcgcccgaactcgcgggtattgatcggcgggctgggcatgggttttaccctggcctcggcgctcaagcatttgggcaaggcggccgaagtagtcgtggccgaactggtgccaggcgttgtggagtggaatcgtgggccgctgggggaaaagtccggccgcccattgctggacccacgcacggtgatccgcatggaagacgtggccaaagtgctgcaggccgagccccagggctttgacgcgatcatgctcgacgtcgataacggccccgaaggtcttacgcaaaaagccaacagctggctgtattccgctggaggcctggccgcgtgcgccaaggcgctgcgccccaagggcgtgctggccgtatggtcggccagcgccgacaaactgttcagtgacaaactgcgcaaggccggtttcaaggccgaagaagtgcaggtgtttgcccatggcaacaaaggcacgcggcacaccatctggattgcagagaagctcaagggctgaacatgacttccaaaacaccatagatccaaatgtggaagcgggcttgctcgctcccacattttgtactgcgtcagtgttgagttttgcggtaatcaatcacatacggcacttttttgtcgaaggtcttatccaactcgccctggtcgagtttggtcataccgcccaactgatgagcagtaaaaccgctgtcgcccacctggttacccggcgccaggctgaccatgcgcttggcaaccgcttcaatggcatccttgtaaccgcccttcttgttcaggttgaacgcactcagatcaatctggctgcgcagccagttaccccagtaaaactcgaggaattccggcgcaatctcgccgtcgtccggcttgccgtaggcggctttgcgcgtgaagtacaccaggctgcggaaggtgtcgtcctgcaggttcttgaagcccaggtgcgccggcaactggtcgggtggcagggtctggcccttgttgtccttgagccagactttgcgcgccgcctccatgcgctgccaaaaggtcgccatgttcgggctgttgctgaaatcgtcggtgaccttgacccacatcttcagttgggagccaccaccgggcacttcccacaaggtggtgaaactgtggtgaccgtcggtcaggtacagctggccaccggggccgaccaccacggttttcatgtcatcgggatgggtgcccaccgggtccttgcaggtgaagctggacggttggtgcaggtcagcctttttcggcacgttgtcggcggcgccctggccgttggtctcgcagtattcgtcgaagactttggcgggtttgtcggcgaacagcccgaggctgtagtaaatctggtcaaagcccaccacggcttgggtcggatgcagctgttcgagggccacctcgatcacctgccccggcttgggcgtggagaacgcctgggcctgggccgtcagaaggctcagtaaaagtgccgctgtccatgtgtgcaaacgcataggtttcagatccttgtgaatggaatgagccgatactacaaacgaatgccgaagccaggctgtaccgcagctgaaaaagccagcggtcatttgcagcgcgagcggctagaatcaaccctatccgtgaaccccaaaatagccaggagccatgatgagctcgaccaacccgccctcccacaccgccaaactggaccgcatcctcgccgatgcccagcgcgaccgggaaatgggctaccgcgacaaagccctgaaaatgtacccccacgtatgcggccgctgcacacgcgagttttccggcaaacgcttgagtgaactgacggtacatcaccgtaaccataatcatgatgacaacccgcaggatggttcgaattgggagttgttgtgcttgtattgccacgacaatgagcactcgcggtataccgaccagcaatactttagcgaaggctccaccagcagcccgacgattgccaaagccacgcacaacccgtttgcggcgttggccggcctgatgaagaaagacgactgaaagtttttgtcgttcttattggcctcatcgcaggcaagccagctcccacattttgatgtgtgaatacctcaaatgtgggagctggcttgcctgagatggcgatcccccaaacactgcatgacttgcaggccgtataatcgccgctttttctcaaggcacccttccccgtgggcaataaacgctacagctgcatcggtctgtataaccccaaatcccccgaaaacgtcggctcggtgatgcgcgccgccggctgctacggcgtggcctcggtgttctacaccggcgtgcgttacgagcgcgcgcgggatttcgtcaccgacaccaagaaagtccaccacgacattccgctgatcggcattgacgacctcaaaaagatcctgccgctgggctgcatcccggtcgccgtggaactggtggaaggcgcgcgcccgttgcccgaatacacccaccccgaccgcgcgctgtacatcttcggcccggaagatggctcgctggataaagagattcgcgactggtgtgaagacgtggtgtatatcccgaccaccggctgcatgaacctggcggccaccgtcaacgtggtgctgtacgaccgcctggccaagggcaacaacacccgttcgggccccaagtactgattgttcgggaacatccggcgcttgctggcagtcagctacatatcactagtccatgttggagacagatcatgagcgacagcaaaatcctgcgacctatcatcgaacacgacccgcgcgaacctcagcccacccagaacgtgcatggctgggaacgtatcggctcggtggccggcggcgtgatgatggtcggcaaaggcctgcgccgtggcgggatcttcgggttgattcaggtggcgatcggcggcgtggcactggcccgtggttttaccggccacagctcgctcaaggacaagttggaacagggccgccaggaaatgaacagcgtgcgtacgaaaattgagcgtgcgggggcggagctgaagaacttgaagaccaaggcggaagtggcggctgagaaagcgaccaaaactacagcctgactcccctctccagaatattggagctcccacatttttgttttgtgtagggtttgggaatcagcgcagtagcttgttatccagcaccaccgacgactcgccgatgatgctttcagccagctgcacaaactccggcgtagtgatgctgttcgcccgcatcaccgcctgcgccaaatcatcaagagaccgcttgttgtgggttttcacacggatctcgcggtccagctcctgcaacagcaacacggcctgcgccacagtggccgggctgacgtgttcgccgcgcaatgtggtgacgcccttgccctccttgccaagccgcgcctgaatcgccgcataccgctcatcggtaatgccgccggcccgtcgcaacagttcaatggcgtaatactcgcccaaaccttcgctgatccagtcactgctctcgtggtcgttgaaacggccgatggcctgtaccacttcgcggatcaacgggctgctgccgttttcgctgaccagcggcgtgcggctgttgaggtagatcgaatcgcgggacgaaaacacgccacggcgcatcgggtcactggcgcccaccaccagcagttttgccgggtggcgcgggaatgccgcctcgatttgcggccagacgaaggtcagcaacgtcagcacatccatgcgccgcatcgcctggcctttgggcgaggccacggtgacttcggtctcgcccaagcgcacgcgacggctgccgaggttgccggcgagcatccagcctgtgggccggtcaaacagccgggaaacgttgtcgatgcggaatttgttcttgccgatgcgcggccaggcggtctcgacgcttttccagccggcgggcagctcgaatatcagccgcgagaccagctctacgccgtcctgctgatcgagccgcgcagttggaaccaggtcttcgccgcgaaacagcgcccagttcggcgtcatccgggcttcatagatgcccggtttgcgcgcatgggtcaggcgtacgcggtaggtcaggctggcctgatcggcgcccggttgccacaggccacggctgccggtgactttccactggccgtcggccttgaaatcgctgtagtcgccggcacgccccaggtcgaagtccaggctgcgcacggcagaaccgtgggacaggctcacgcgcacttcagcctgctcggtttgcggcagcagcttgacgtgataatccaggtcgactttttttccgcaccagccctgcccgctcagggtcagcaataccaggctcgccgccagcttgactcccaccttcatgcccattcctttttcagcccgcgcggaagatcaggtaatcctcccagtcgtcttcgggcacgctgccttcgctgagcatgcgcccggactgggaaatgcgttcgtggtgcacggcgtcgcggtcgccgcagaccaggtggtgccacaacggtaggtctttgcgctcgctgaccaggcggtagccgcaggtcggcggcagccatttgaactggtcggcctggcccggggtgagctggatgcagtcgggcaccgacgcgcgacggttggggtagtcggtgcactggcaggttttcaggtccagcagtttgcaggcgatgcgcgtgtaatagacgctgttgtcgtcttcatcctcaagcttttgcaggcagcacaggccgcagccgtcgcacaacgactcccactcctcctgatcgaggtgttcgagggttttgcgtatccagaaaggttcgactttggcggccatggctctacatcagtatcggtcggtgaaaaggccgccagtctagtgccacaggcccgtggggccaagcgcttacgacctgcggtgtaacaacacttgtcagtctagcggccgcgcagtagctttgaacgccgaattgacgatcaggaactgctccatgacacgtgttgccgactatccgatccacacccagttcactgaacgctggtcgcctcgtgccttcaccggcgagagcatttcgaaggacaccctgctgagtttctttgaagccgcgcgctgggcgccgtctgcctacaactcgcaaccatggcgttttctctacgcgcgccgtgacacgccggactgggaacgtttcctgggcctgctgaatgaattcaaccgcaactgggcgcaacacgcctcggcgctggtgatcatcgcctcgaaaaccgacttcaccgcccccggcgccactgaagaaaccccggcgctgtggcacaccttcgacaccggctcggcctggggccacctggcattgcaagccagcctcagcggctggcacacccacggcatggccggctttgatcaagagctgacccgcaaggagctgaagattccagaaggctatgcactgcacgcagcggtggcggtgggcaaactgggcgataaatcgagcttgccggaatacctgcaaggccgtgaagcgccgagcccgcgcaagccgttgagcgagctggtttccgagggtgatttcagcctgtaaggcttacacagatcccatgtgggagcgggcttgcccgcgattgcggtgtgtcagccactgatttattgactgacataacgctatcgcgggcaagcccgctcccacattttttgatttgcggtggtgtcagtatccgcgctcgaagctcacttcgccgcgcaacgcttccttggcctgatacgcccgcaagttctgcacaaacaacgccaccatcatcgacggcgaggtcggcgccgagctgtgcccggtcagcagcaagccccaggcggtccagaacgggtgacgttgcggcaaaggttcctggcggcacacatcgatcaccgcgccagccaggtgcccttctttcaaagcctcgaccagatcagcatccaccaccgccacaccgcgcccgacgttaatgaacagcccggtcggcttgaattgcttgaacagcgccgcgtcgtacagatcgtgggtctcgggcgtgttgggcagcaggttgatcacgtaatccacctcgcccaccaggcggcccagttggtccagcccggcgacttcgataaacggtgcctgctcacgcgcagtgctggcaatgccgtacagctttacgccaaacggcagcaggaaatccgcgacactctggccaatatcaccggtgcccacgatcaacgccttgcgccccgccaggctctggcccatgcggttgtcccacttgcgctcgacctggctgaccagccgcgccagcacttcgcgctcgtggccgagcatgtaggtgaggacaaactcggccatgacctggccaaaaataccgaccgcacgggtcaggcgatagtcgcggggcaagccttcggcgagcagcggtgtgatgcccgcccaggtcgattgcagccattgcggcgtatggccctggcgcaacaaagtggcaagcaggtcgggctggccgagccagatcgggcagtcagcggccaggcgcgacagctcggccgagtcgccgctggtcaatacttccaggtccgccgccgcctcactcaggagttgggcgtagagcgggtgatcctgttcagcaatcagaacacgcatggttcaaacctttcaaaaacagtgcagacggccgcccgcttccttacggccaccgccaaactaatacgttttcctggatgaaagtgcccgggacagggcacccaccgatcacatcgggtcgttgcggcgcagcagctcttcgggcaagtgctcgatgtactcgtcctcggccggcggcatttgcaggtggtagccctgcttgtcgaggttttccaataccacggtgatgtcttcgcgcgacagtttgcgctccggggtcaacaccatgtcgaacgcgtggtgggctttgccgaacgcgatcatcagcggttccggcacgcgctccagggcatcgcttttgagcacataaaggtacatgccgtcttttttcaagctgcgataaatggagcaaatacgtttcaaggctgttctccggcagtggccaggctgtcgagcagcgcctggcccatcaactcgcggcgccagccacgcagcgagtctggcaattggtaaggcccatcgggatagccacttttgaccagggcttcgagggttttcttgcgcagcatcagttccggcgccatgttcaggcgttcggcttcggtttggccataggcacgcagttgcttgatcagcgtggcagcgtcaaccggcagcggctcggcaacggcaggcggccattggtccataggcacgctgccagcacgtttgatcaggtccagcagaaactggccgtcctgacgcacggtgcgcgggtgcatgtcttcgattttacccagggcggcgagattatccggctgggatttggccaatggccacagcgagtgttcacgaatgatgcggttgcgcggcaagtcacgggcccgggcttgctgctcgcgccaggcgcacagttcgcgcagcacggcgagttgggcgcgcgagagcttccacgccagcttggcgtcgcggtacacctcgtacgggtccacttcgcggcgcaggttggcgaccaactcggcgccgtcttccagcacccaggcgtatttgtcgtccgacaattgcgggcgcaggcgggtgtagacctcggccagatgcaccgcatcttcggcggcgtagctcacctgggtttcggacagtggccgctgcagccagtccgagcgggtttcacccttgggcaactcgatatcgagcacggcttgcaccaggcgcgaatagcccatggagaaaccgaggttcaggtaagccgccgccaattgggtgtcaaatagcggcaccggcaggctgccggtcaggcgcagcagcacttcgaggtcttcgctgcaggcgtgcaccaccttgatcactgccgggttctccagcaaggcggccaagggttgccagttgtcgatggtcagggggtcgatcaggtaagcgcgtttgccatcgccgatctggatcagcccggcaatgggataaaaggtgtcgacccgcatgaattcggtgtcgagggcgacgaatggcaactgctgccattcggcgcaatgctggccgaggctatcgttgtcgcagatccagtgaatatcgatggccacacggctctcccttgaagaatggcgcgcagtatatatcgcgaaagggagttgcgagcatccgcagtgcacacgccttcatgaaaactccgacaagagttgaagaatagtccgacgagcgggacttatcctctcttacgcaaaacgtagacgcgccacagctttgaacccggcaggaattcctgctggttcaagaccttgaagcccgactcgcggaactcgctttccatgggtgtgctggagttgaccgaaacaatcaccgtgtcacggctgacccggtgaaactcgcgcagcagcatcaggcgcacgtcggtggcgggcacatggcgaaacagttccaggcaaaaaatgcagtccaccgcattcgcggacaacccgatggaaaacgccgagccctggaaggttttgacgcgtttgagcaatgaagccgggtgatgggtcagcgcgtggtcgagcattgcctgggaattatccgaggccaggatcacccggttgacgtgttcggccagcaccggccagaagcgccccgagccgcaggccaggtcgaggatcagccccggctcgcctgccactttcagcgcctggcgcaccaaccgttcatcgcgccaggcacccaggcgcttgagcagcaccggcgggcgcgcgtcaccgcagacccgggcatgctcacggccgcagtgctcggcgaattcaatctcgatagaggatgggggttgtgacgacatcacgggctcatgtgagtggaacggtagtgaacgaccttgatccgcaggttaacccgtgcaacgtgaaaaaaaagtcgaaagccttccagcctgccaattctcaccacaacaagcccactcaccacaacagcgcgggattcacgcctggtgcaggtaccaccgccaatcctgctcgccgacttcgcccatgaactggcggtattcagcgcgcttcaccgccaggtacacgcccaggaactcgctgccaaacgcatcccgtgcccagcttgagccttcgagggcgcgcagggtggtgagccaatcggtgggcaacaattccttggcctgggcgtaaccgttgccttctaccggggcgccggggtcgcgtctttcgcgaataccgctgtggatgcccgccaggatggctgcagcggccagataagggttggcatcagcgccgcagatccggtgttcgatatgccgcgagttcgccgggccaccgggcacgcgcaggctgacggtgcggttgtccaccccccaggtcgccgccaacggcgcgtagctgttgctctgaaagcggcgataggagttagcgttggggcagaacatcagcaacgcatcgagcaaggtgctgagcatgccgcccaccgcctggcgcagcagcggtgtgccatcggcggcctcgctggcgaacaggttgttgccctgggcgtcagccaggctgacgtgcatgtgcatgccggtgccggccaggtcgtcaaagggtttggccataaagcaggcggtcatgccgtgcttgtgggccacgcccttgaccaggcgtttgtagcgcaccgcttcatccatggcttgcagcgcgtcggcacggtgttccagggtgatttccacctggcccggggcgtattcggaaatcgccgtgcgcgccgggatgccttgcagtttgcaggcgctgtaaaggtcggccagaaacggctcgatttgctccaactcacgcaggccgtagacctgggtcgagcgcggacggttgccgtccacgtcccgcgccggttgtgggcggccgttgctgtcgggtttctggtcgagcaggtagaactccagctcggccgccatcaccgggtaatagccatcagccttgagcccgtcgatgaccttttccagcaaatgccgggggtcggccacggtggccggcaagccttcggtggggtgcatgctgacctgcaccgccgccgtcgggatcagccgccatggcatgcgctgcaaactgccgctgaccgggtaggcgcggcagtcgatatcaccgacctcccagaccaggccggagttttccacatcgtcgccattgatcgtcaggccaagaatggtgctgggcaatggccggccactttcgtacaccgccagcagctcgtcgcggtgcagcaacttgccgcggggtacgccattgttgtcgaggataaacagctcgaacatctcgatgtccgggttctgctcaaggaaagattgggcttcgtgcaggctcgcgaaaacactcatggcaattctcatacggttgcgtcaggcaggcgcacaggcgccgccaggcagacgcgcgcaagtgcgcgtcatccatggggcagatcaacgtgggagaagagtgtctggtgggcgcgcgtgtcggcagtggaacaaagcccagaaggccagctcggagggcaatgcctcgacaaccgtcggacggctcggcaccaaggcgccgggcgatgtctcggggtgagtgtcgggggaaccgtccatgcaaaagtcacaataaggtagatacccggcagcgtcacatgccgccaaaggttgttcaattcagggttgacggagtttggttgcagcttggctaaacaattgccttccccccgatttgctggaaataatggcgcccccgatcatgcccccaaggaatcgaccgcatgaaagcgcctctggccttctgtttactggcaagcctggctacccacgccttggccgactcgcggcttgatgacgtgcagcagcgcggcaccctgaacgtctgcaccaccggcgactacaagccttactcttccctgcgcgacgacggccgctacgaaggcatcgacatcgccatggccgagtcactggcaaagagcctgaacgcgaaaatccgctgggtgcccactacctggaaaaccttgatgcctgacttcatcgcccaacgctgcgacatcgccgtgggcggcatttcggtgtcactggagcgccagaaaaaagccttcttcagccagcccctcggcgtcgacggcaagatcccgctggtgcgttgcgcggatgtgcagcgctatcagagtgtcgaacagatcaacaaacccgaggtacgggtgatcgagccggcaggcggcaccaacgaaatcttcgcccgcgcgcaccttggccaggcgcaaatccgcctgcacgacaacgtgaccatctttgacgaactgctgacaggcaaagccgacgtgatgatcaccgacgccagcgaggcgcgttaccagcaaaaactcaagccggggctgtgcgcggtcaacccggagcggcaaatgcagtacagcgaaaaagcctttctgctgccccgcgatgatgtggcctggaagagctacgtcgaccagtggttgcacctgagcgtggccaccggcgtgtatgccggcatcgtcaatcaatggctggcagcgccctgagccccggcggtctacgctgttgtcacatctaacaagaacgaggaacgggtcatgaagggactgctccgactcacctggctgctgctgttgggtttcagccaggtgcacgcggccacggcgcaagaagaagacgcggtggcggccaagacgttactggaaaaagccctggtgtattaccaggcgaacggcgacaaagcctttgcggcgttcagccgccagggtgagtttgtcgaccatgaccgctatgtgtttgtggtcgacacccagggtgtgttgctggccagtggcgggccctcctccgcgttgatcggtcgcgatgtgtccgaggtgttggggccggatttgcgtcaatcattcaaggatgcgttgaaggtgcctgagggtcagggtattcagcaggcggactaccgctggcagaactggaatgacggcaaagtggaacacaagcatgtgttttaccagcgtgtgggcgagcggattctggcggtcgggtattacctgccacgcgctacgcctgaacaggcgcgggcgctgcgtaacaaggcggcaacggcgttgctgaaggatgaagcggggacgctgaaggcgatcaactcattgcagggcggttttttgcaggatgacctgtatgtgtttgtggtggacctgaataccgggcgctatgtagcgcacgggacgaacttgcgcctggtgaatacggatttcggcaagatcaaggacccggacggaaagcctgtcggggagccgatgctgaagatcatggcggagcaggatcagggggaatacaagtatcggtggaagaatccggtgactgaccgggttgagaacaagcatgcttatgtgcgtaaggcggggcattttatggtggcggtggggtattactcgccctgaggatggggggtgtatatccgttatttgggtaacggcggcttatggttccgctcttacagcgggtcacttttgaaaagagccggaatgccggcccagccaaaagtaaccaaaaggctcttgcccctacactcggcacctcgctcatgctcggtgtgcccgtaatccgacattgatttggggggccgccgccacgcgccatccatggcgcgtcgcggctaaaccggcgtcctgccggtttaccccccaaatcaatgccgaattccggccagcgtgttttgacggggcgcccaagatcaagatcaaaagcacggcggcctgacagccggcctgagtggtgtagatcaacagcgcggcccagtgtgggagctggcttgcctgcgatggcatctactaggtgtacctgatgtaccgaggtgtctgtatcgcaggcaagccagctcccacaattggatctccacttgtctggatagaccgcaacctgccctggcaaaaacaatgctgttgcttcaaccactcaggccggctgtcaggccgccgtgcttttgcttttgatcctgggcgccccgttaaacacgatggccgaacgcaggcttgaattcgtgggtaacccggcaggacgccgggttagccgcgatgggccagggatggcccatggcggcggcccacggattcaagccggagtgagggcacaccgagcctaggcgaggtgccgagtgtaggggcaagagcccttttggttacttttgggctgggccggcattccggctcttttccaaaagtgacccgccgtaagggcggaaccaatacccgccatcacccaaataacggatatacacaccactagcgagccttatcctcccgcccccgcaaaacccgattcggcatggcaaccgccgccgccaaccccaacaacgacacccccgcactcaccatcagcagatgccggaacgtcaccgccaattccccgcgcaacgcatcctgcgccgggccgggcgcggcgttcaggccgtcgagcaagacgttgcccgacccaccctcgcccgcgaacgcaccactggccaaatgcgcaaaactcgaatcctgcaacaacgccaacaacagcgctgacatcgaagcgacccctaccgccccacccaacgaacggaacaggttagtggtactggtcgccacaccaatgtcacgctggtcgaccgaattctgcgtccccaccaacgaggtcggaaactgcatccccgccgcgatgccacagagcaacataaacaccgccgtcaacgccaccgcttgcggcgcgctgtaggccatgcccagtatcgccagcgggctcaacaacgcgccgctgagaatcatcggtttatagcgcccggtcacggaggtcatgcgcccggcaaaataggctcccatcggcaaccccatcgccaagggcagcaagtgcagcgccgcgctgtcggcaccggagccggtcaccgtctgataccgcagcggcatcagtaccgtcagggaaatcgcctgaaagctggtaaagaaaatcgtgcaccaacacaacactgcgctgcggttggcaaacaggtgcatcggcaacaagggctcgcgcgcacggcgttcgtgccacacaaacacactcagcgccaccagtgcacaccccagcaacccgagcacttgctgatcacgccaatggtggccctggccaatttcggtaatgcccagcaacaaggcggtcaagccgatgatcatcagcaaggtgcccaggtaatcgatgatcggcttgcgctgcggcacgggcagcccgaccagggtgcgatgcgccacgtaccaggcgcctgcgcccaaaggcaggttgatcaggaacacccagcgccacgacaggtactcggtcatgtagccgcccaacaccggcccggctacgctggccaccgcgtacatgctgctgaagtagccctggtagcgcccacgctcgcggggcgggatgatgtcgccgatgatcgcctggctcaccgaaatcatcccgccggcaccgatcccctggagaatccgcgccagcaccagttgctccatgctttgcgccatgccgcagaacagtgaggcgagggtaaacacgcccatgccgatcagcatcatcggccggcgcccgtacaggtcgccgagcttgccgtagatcggcaccgccacggtcatcgccaccatgtagccggagatcacccaggccagcaagttgacgtcatggaactgcgcagaaatggccggcatcgacacggcgacaatggtctggtccaaagcccccaggaagatcgccagcatcaaggcggcaagcacactgcgtacggcgggaacgggttgggcgggctgattcaggttagtcacggcagaaccttcgagcagggcccgcaggaaaggaagggccggcgggaatgctcaacatcttactcgatagctggctattcgatagcctcgtaaggaagcccgacgtaattttctgcaatggttttgcgaccggcttcagagtgaatgaagtaggccagttcactctcggcaatgcgctggctgaaaccgtccgcctcggggaattcgtgcaacatcgaggtcatccaccaggaaaaccgctcagccttccacacacggcgcaggcaaatggccgagtacttttccagcaggtccacacgcccttcgcggtagaccttgagcaggatccggtacagcgtgctcacatcactggccgccaggttcaagcccttggccccggtaggcggcacgatgtgcgcggcgtcgccgagcaggaacaggcgcccatactgcatcggctccaccacgaaactgcgcagcggcgcgatgcttttctcgatggacgggccggtgaccaacctctgggccagttcacccggcagacggcttttcagttcatcccagaagcgttcgtccgaccattcatccagcggctcctgcgccggtacttgcaggtaataacggctgcgggtcggcgagcgcatgctgcacagggcaaagccacgcgggtgtttggcgtacaccagctcagggtgcaccggcggcgtgtccgcgaggatgcccagccagccaaagggatagacgcgctcaaacaccttcagggattgcgccgggatcgactggcgcgccacgccgtggaaaccgtcgcaaccggcaatgtagtcgcaatccaggcgaacgcgttcgccctgatattcgaaggtcaaccaggggcggtcggttttcatgtcatggggttgcacattgcgcgcttcgtagagcgtgacgccaccggcgtcggcccgcgcggtcatgaggtcgcgagtgacctcggtctggccgtagaccatcaccgactggccgccggtcaacgctttaaggtcgatatggctgagctgaccattgagcaccagttcaaacccctcatgcaccaggccttcggcgtccatgcgctggctcacgcccgcctcgcgcaacaggtcgaccatgccctgctccagcaccccggcgcggatgcggccctttacataatcagcagcctggcgctccaggataagggtctggataccggcgttgtgcagcagttgaccgagcagcaatcccgaaggaccggcgccgataatggcgacttgggttttcagcgttttcattatttttatggcccgcaagcttcaccgaacggattgggtgaaagagttgtcattgaactgattgctggcatttttcacttgagtggccggcataagaaggtgaaaactgagccaatgcctgcgctttttgccaatcggggcgattaccgcaccactatcctgagtatcggattgaaaccatgaccaaaactgccagttccgcgattccggtcttcaaactgtacggggaaagccagcaatggccgacaccggatttactgcactgcgagaccatctcccggcgcagccgggaataccagtgggaaatccagccccaccggcacgcggatctgtgccagttgttgtacgtacacaaaggccaggcacaactggaaatcgaaggccagcgcaccacactcaacgaagccaccttgcaggtgctgccaccgttatgcgtgcacggttttcgtttttccgaggatgtcgaaggctacgtggtgaccctggcggcgccactggtcagccatttacaggaacaactgggcgcgacggtggatgggttgcaggccctgggcaactaccccgccggcaaggacagcgactacctcaatgcgcaattcgcccgcctgcagaccgaatacgccgatgaacaacccgcacgggacatgatgatgcacgcattggtcagcgtgttgctggtgtggatcagccgccaggccatccagcgccgtcacccgcgcgcgccacgtggccgtgagtatttccggcgcttcacccagttggtcgaacagcattaccgcgagcacccgaaaatcgaagatctggcccacgagctgggcatctcggtctcacacctgaacgggacgtgtcgggagttgggcgggcagcccgcgctgcagatcatgcatgaccgccaattgcttgaggccaaacgcttgttgacctacaccagcatgaccatcaatgagatgtcggaggtgttggggttttccgacccgaccaacttctcacggttgttccgccgacgggtcggcttctcacccaaggcctttcgcgagcagttgaaagcggagcaggccgttacctgagcgcgctgaaactgccggtgcgcggcacgcacaggtcctgatgacaactgacggcgaacgccgccggctgcatgcgcgtctgttcaacgcggtaggcggcagtaccgtaaagcgcagtagccagggcgcacagggtgaaaatcatcaggtactttctaatttttagagtcatggcggcgacctccgaacaggccttgatgggcctgtttaaagcataggtcagtcacggcgagttgccattatcgggcgccattcaacacgtttatgtcggcttaaaggccgatgtcccacgccggctcttgcgggaacctgagcaccaggaaatccagcaggctgcgcagcgccaacggcatgtgtttgcgcgaagcgtacaccgcgtagacattcatttgctgcggctcagcctcgggcagcagacggatcagctcgccgctgcggatgtagtccccggcctgataactcggcagccgcgccacccctgccccggccagcgtcacccgcagcagggtcgtggcctcgttggcggtgatattgccctgcaccgccacggacaccggcccgccgttctcggtgaagtgccacaggcttttgccgaagtaggagtgcgtcaggcaattgtgttcggccagttcgtgcacgcgccggggttgcgaatgctcctgcaggtacgcgggtgaggcgcagatcaccgagcggcacagcgtgagcttgcgcgcgatcaggttggggtccagctcaaagctggtgcggatggccaggtcgatgcgctcatccaccaggttcacggtgcggtcgagcatctgcatatcgatactgaccaacgggtacagcttgacgtattcggcgaccgcatcggccaactgggcctggccgaacgagctgctgacactcaagcggatctggccgcgcggggcttcatccggctcagtgacagcggcttgcatgtcgttgcacagctccagcatctgccgacaacgcggcagcatttcgctgccggctgccgtgaggctgagcttgcgcgtggtgcggtgcatcaaccgcgccccaacccagtcctccagctcggccagatagcgcgacaccaccggccgcgacaggtccagatgatcagcggcggcggactggctgcccaggtccactacgctgacaaacacgcgcattgcttgaagacggtccatgatttgcccggttttagaaacaaactatgttcaagcatggcattttttgtgacgtttagtgcaactaagctctgtgcatcattgaccccctgctggagctgcacatgatcccgatgttcaaacgattggccaccgccatggccgctttggctttcgccgcccacgccgcggctgccgacctgacgctggacgcctacaacccgggcgcctcggcgatgatgccggtcagttcggtgctggtcagcggcgaacacgacgtcatcctggtcaacgcgcaattcggcaacggccaggctgaagacctggtgcagaaaatccgcgccagcggcaagcacctcaccaccatctacgtcagcgatggcgacccggactactacttcggcctcgatgtgctgaccaaggccttccccgacgccaaggtgctggcctcgcaaccggtggtcgaccacatcaacgccaccgccgaacacaaactcgcgttctggggcccgaaactcggcgccgacaaaccggtgaagctcgtcatcccgcaagtgttgcaaggccatacgctgacccttgaaggcaaaacactggaagtcatcggcctcgacggcccgcaaccggaccgcacttttgtatggattccgtcgatcaaggccgtggtcggcggcgtcgtggtatttgaaaacactcacgtgtggatggctgacacccaaacggcaaaatcccatgccgactggctgaacaccctcaagcgtattgaagagctgaaaccgcgcaccgtgatcccgggccattacctgggtacaccgaccgtgcagtccgtggcctttaccgccggctacatcaaggcgttcgatgaagagaccgccaaagccaaggacgccgccgccctgatcgcggccatgaaaacgcgttaccccaacctcgccgacgaaggcagcctggaactgggcgccaaagtcgccaagggcgaaatgaagtggtgaatggttttaaaccctgacctgactggagaacgtcatgagcaagatcgcaatcattggtgccaccggccgtgccggtagccaactgctggaagaagcactgcgtcgcgggcatagcgtgaccgccattgcgcgtaacaccgacaaactcacggtgcgcccgggtgtcaccgtcaaacaggtggatgcgctggatgctgaggctttgcaacacgccgtcagcggcagtgatgtggtgatcagtgcggcacacttcgccaccctgcccgccagcgcggtcatcggcccggtgacagcggccggcgtaaaacgattgctggtggtgggcggtgccggttcgttgctgttgccggacggcggccgcgtcatcgatagcccgggcttcccggcggagtacaaggctgaagccagcgccggcgccgagtttctcgccacgctgcgtcaggagaaaggtctggattggactttcctgtcgccgtcggcggagttcgtcgagaccgagcgcaccggcaaattccgtctgggccaggatgatttgctggtcagcagcgaaggccgcagctggattagctttgctgactatgcaattgcgttgatcgacgaagtggaaacgccaaagcactcccgtcagcgcttcaccgtcggttactgatacaacagggtaaacctgcgtaagaggactcatgtgagagctggcttgtcgaatcgtcgcaccgctacgatgcaggcaactcggagtgtcagctataccgaggtgatgctatcgcaggcaagccagctcccacacaagctctgctcccacagttggttcttcagtgttacggctgttgcgcctggctcaccagccaattcataagcgcttccagcccggccgacggcgccgtccccggcggatacaccaggtaataccccatcccagtcggcacccgcagttcgaacggcgtcgccaaccgccccgctttcaggtcctcgccgatcagcgcgctatcgccaatcgccacgcccgaaccttgggatgccaccgtcatggccaaatccagcgtttcgaaatgatgcccctgagccaggttgctcagccgcgtattcgcagcctttaaccacaatgcccaatcgcgctcatcccgtgtggggtgtaaaagcacctgctgctgcaagtcggcgggtgtatgtaaacctgcaagcaatgccggcgcgcaaaccggcgtgagttgctcgtcaaacaaatgccgggcctcggcggactgctcggcgataggcgtgtaaatcaccgccgcatcgaattgctcgcggcgaaagtccacggtgtaggccacggtggtcgtcagttccaccggcacgtccgggcgttccttttgccattgcatcaaccgtggcagcagccagcgcatcacgcaggtggaggctttgagttgcagggtttcgcggcggctgccgatctgctccaccgcatcgccgatcaggccgaacacctgttgcgcgcgcagcgaccactcacggccctcttccgtcaggctcaagcctcgcgcctggcgctgaaacaacgcgtagcccaaatggctttccagcccggcaatctgccggctcaccgcgccctgggtaatgtgcaattgctcggcggcgcgggtgaaattgcagcactgggccgtgacccaaaaagtgtgcaacgcgggcagtggagggaggcgtttcattgggctcagccatgacgtgaggacatggctagtatgactttttatcgattgttggcgctacgggccagccggtccaataccgcctcgaatccataacaagagcgacatctatggcgacctgcggcgaagtattggtcaacctcctggaaagctacggtgtggaccaggtgttcggcatccccggcgtgcacaccgtggagctgtatcgcggcctggcgcgctcgagcatccgccacgtcaccccgcgccacgagcagggcgcaggctttatggccgacggctatgcccgcaccagcggcaaacccggcgtgtgcttcatcatcaccgggccgggcatgaccaatatcaccacggccatgggccaggcctacgccgactcgatcccgatgctggtgatttccagcgtgcagtcgcgcagccagttgggtggcgggcgcggcaagttgcacgaattgccgaaccagggcgcgatgattgcgggcgtggcggcgttctcgcatacgttgatgtcagccgccgaattgcccggcgtgctggcgcgggcgtttgcgctgttccaggctggccggccgcgcccggtgcacattgaaatcccgctggatgtgctggtggaaaatgccgacgcgttgctcggcagtgagccggtcagtgtcgcccgcgccggtgccgcgccatcggcagtcaagcagatgagccagttgctggctgcggcaaaacgtccgctgatcctggccggcggcggcgccattgacgccgcgcccgagctgacccgcctcgccgaaaccctcggcgcgccggtggccctgaccatcaacgccaaaggcatgctgccgggggcgcacccactgctgattggctcgacccaaaccctggtcgccacccgcgcattggtcgccgaggctgacgtggtgctggccattggcacggagctggcggaaaccgactatgacgtgactttcgccggtggcttcgagattcccggcgccctgctgcgcatcgacatcgaccccgaccagaccgtgcgtaactaccggccgcacgtggcattggtggctgatgcacagatcgccgccgatgccttgttgaccgagctgaacagcaagccattgcccgctcgcgatccacagtggggcgcgcaacgtgtcgcgcgtttatgggccgaattgacgcccgcctgggatgcccccacccgcgcacaaaccctgttcctcaacaccgtgctggaagaactgccaggcgccgtactggtcggcgactccacccaaccggtgtacagcggcaacctgaccctgaacctcgaccacccccgccgctggttcaactcgtccaccggctacggcacgctcggttacgccctgcctgccgccatcggctcctggctggggcgtggcgacgggcagcccgtggtgtgcctgatcggcgacggcggcctgcagttcagcctgccggaactggccagcgccgtggaagcacgcgtgccggtgatcgtgctgctgtggaataaccagggctacgaagagatcaaaaaatacatggtcaaccgcgccatcgagccggtcggcgtggacatctacaccccggactttatcggcgtggccaaagcactcggttgcgccgccgaaagcatccagggcgttgaacatttgcgcggcgccttgcgcgccgctgctgatcgccaggggccgacgctgattgaaatcgaccaagggctttggatgaaggaggtagcggtatgagcgcagtgttgaatggtgtgtttatcggcggcgagtggcaggcaggctgtgaagtgttggaggtgatcaacccggcgaccgaggccacgttggcccaggtcagcgtaggcgatgcggcggcggtgacgcgggcggtggatgcggccagcgcagcgtttgccgcttggtcgaaaagcaccgggcgggatcgcggtgccctgttgcgcaagattgccagaggcgtcagcgaacaacgcgaacagctgatgcagctgcaatcgagcaacaacggcaagccattgtttgagtcgggaatcgatgtggacgacgtgatcgccaccttcgagtattacgccggtgtggctgacgaaatggacaccgcacaggacagtcccgtcgcgctgccaggcgacgatttcagtgcacgcctgcgccgtgagccgtgcggcgtggtggggctgattgtgccgtggaatttcccgatggtgaccaccgcctggaaactcgccccggccctggccgccggctgctgcgtggtgctcaagccgtcggaagtcacgccgctggccgagctgcaactggcgcgaatcatcgccgaggccggcgtgccggcgggtgtgttcaacctggtctgcggcacgggcctggcggtgggcgcgccgctggcagccgatcgccgcgtggcgaagatttccttcaccggcagcaatgcagtgggcgtgcaggtaatgcaacgcgcggcggaaaccatcaagggcgtgagcctggaattgggtggtaaatcctcgttgctggtgctggccgatgccgacctcgacctggcggttgagctggcctgtggcggtggctttttcaacgccgggcagatctgctccgcaaccagccgcgtgctggtagcggacagcctggcggatgaattcctgcaacgcttgcaggcgcgggctgaaggcattcgcgtggctgaaccgtttgccgatgacgtggaaatgggtgcgctgatcaaccgggcgcagtatcagcgggtgctcgggcatattcagcgtggcatcgaagagggtgcacggttgctgtgcggcggtgagcggccggcgcacctggcgaaaggctttttcattcggccgacggtgtttaccgatgtaccgccaggcagcgccttgtggaatgaagagatcttcgggccggtgctgtgtgtaaggcgttttaccactgaagacgaagctgttgcgctggccaatgacagcgatttcggcttggtcgccagtgtggtcaccgcccatgcgcaaaccgcagatcgcgtggcgaatgccttgcaagccggtttggtgtggatcaacgcgccgcaggtgatcttcccgcagaccgcatggggcggttacaagcagagcagcatcggccgcgaactggggccgtgggggttggcggcgtttcaggagatcaagcatgtgatccgctctcgctaacgccacaaaacccctgtgggagctggcttgcctgcgatagctatcggtcagttaatgcagtgttgactgaagcaccgctatcgcaggcaagccagctcccacagctggatttgcggtgtgtcagtgatctgcaattttttacgacccgtgcgcctttctgatttgcccctcgcccccacagcattacacacgacatattcgctcacgtcgtgttaccaacattatttgtcccacaccaaacatagaaacgacctacagagctttctattggtacgggcgttccgttaagcttttgcgcagtcttgtactgaattcggtacaaagggttgacggacgaaaccgatgctaaacagtaacttgctcagaaagctcgatatgcaggacttgatggtgtttatcgccgtctatgaccagagcagcgttaccgaggtgtctgaaacactgttcgtcagccagtccaccgtgagttacagcctgaaaaaactgcgcaccagttttgaagacgagctgtttatcaacacgcgcgcgggcatgcgcccgacgtacaaggccaccaccatgtatggccatgtgcagaagattctggaaagcatcaacctgtgccatgccggtggccaagccttcgacccgacgcacaaggctgtgaccttcaatgtgtgcgccccggaatacttcgagcaactgatcctgccgcgcctgttgaagcacttcgaccgcgccgagctgccggtcatcgtcaatgtgcagaagctggaaaccgaaatccccgccgacgacctgcgcgagggccgcctcgacctggtgatctgcttcggcccgcacgttcaccgcacccataaagacttcaagacccaaatgctgctggaagacgacctagtgtgcgtgttcgataaacgctcggcgcccagggagccggcgttcagcctgcaatccttcgtcgagcggcgccacgtatttcccacgccttgggcctcggacaccaacatgatcgacggctggctggcgcgcaaggcccacaagcgtcaggtgatcgcccgggccgacagttacagcgcggcgttgaagatgatcgccggcaccgactttgtcgtcaccctgccccgccgcgtgcaaaaactgctggcgcccgcgccggcgttcggccattgcgaggcgcccaacgggttgccgggttttaccctggacatgcagtggaacgaaaccagtgagcaggacagcgccaatacctggtttcgcgagcaagtcgtgaaagtgtgcgcggaccagggcttgttgtagtgagcgggcttgccccacgctgcaatgtgcccgacacccgcagcgctcactgacggatcagccgatggcgactttgctgtaggactcacggtccatgtccaccagttgcacactcagttgaatctgcacgtcggccggccattcgcccaggtcttgcagcgcggccagcaggctttccgacagctgtttcttgacctgcggcgaacgcccgctgagcaaggacagtttcaccgcgataaagccgcgtgggctgagggaggtgcccacttgaaacgtctcgaccttcaccgcgcgactcttgatatcgaactcggaaccgaactgcccggacgccatcaacacgttgttgagccgcaacagggttttctcaacggccaggtctggcaggttggcggtgtattccaggtgcaggtgcggcatgaaaggctccgaatggttgtaggaaaagagtcatacatataccacgcagccgaaccgaacccgaccgctttcaatgtgaaaattcggtcagcccccgcagcgagcggttctcccagaacgccacgatcaccaggaccagtgtggtcagcgcgcccaacaccaatgccgagaacacctgctgcagccccaacggcaatagcaccagcaacatcagcaacccggcgaggtgcgagaacggtggcaacggccggtcgcccatcacccacttgaacaacgcactgcccaacagaaacacccacgggccggcgatgatcgcgataacccccgcctggctggcgtgaccgggatgcaccagcaccaattcgtcggcgaccgcgctgacaatgatcccggcgacgatcaacacgtgcaggtaggtgtaggcaatccgcgcctgccggccagggtcggcggagctggcaatgcggtgatgggcgcgctcggcgccgctgtcgaagtagatccaccacagcgcgatgctgcccaccactgccaccaggaaggcactgaggccttccagactccagggcagctcggcgaaggtggcgccggtgaccagcaacgactcccccaaggcgatgatcacgaacaggccgcagcgttcggccatgtggttgccttccacgttccagtccgtcagcgtcgaacgcccaagccccggcacccagaaatacaccgacggcgagatcagctcgatcaacaacgccagggcccagaaggccaggcgctgttcgccttcaagcagcgcgccggtgatccagaacaccccggagcagagcatccacgccagaatccgctggaagttgcgggtcatgttcagcgactcgccgcgcacggcccacactgcaaacagcgtacggcccacttgcatgaacacgtaggcaccggcaaacagcaggccgcgatcggtaaacgccttgggaatcgacgaggacaacagcagcccggcgaccatcaagccgaacaggccgatgcggatcgggattttttcggggtcgagccagttggtcacccaggaggtgaagatccacacccaccacaccgccaccatcatcagcgccacctgcaccgcgccgccaaggctcagatgggcgagcagcgaatgggacaattgggtcacggcgaacacaaacaccaggtcgaaaaacagttcgaccatgccaaccttgccgctgtcatgactgccgcgcccacgcagcaaggaacgggatgaggtcatcggtggttctccctgaaggcgttatttcaagatttttgcgccggtacgggcagcctgtcgcgctcactcatgaaggcttcgagccgcgagcgcatccagcgctcggccgggtcggtgtcgacgtggctgagccagaccatggacaagtccagggtcggggtttcgaacgggaacggctcgcagaacaggttgccgccggccgccatggcgtgggcggtgtagtccggcaggctggcgatcatgtcggtgccggcgagcagcgccggcagcgcactgtattgcggcaccgacaacaccacgtggcgcttgcgccccacctccgccagccattcatcggcaaacccggacacgttggcggtgtgagagaccaatacgtgggggcgtgcgcagtattcgtcgagggtcagcggtgtgtccgaggcgtcggcgcgcaacaggcaggggcggatatgccgcagcagtttgcgcttggcattggccggcaggccgcgcgtctgggtgatgccgacggtgatatcgccggacgccaacaggtcaggaatgcgccagtaatccacatgctgcaccacgaacaccaccagcggcgcttcctggcgcaaggcgcgcagcaacggcggcaacaggccgaactccacgtcatcggacaggccgatgcggaaggtcatggtgctgatggacgggtcaaaatcatgggtcaggctcagcgccgatgacagcgaatccagggccggcgacaagtgctggatgatttcttcggcgcgtgcggtgggctccatgcggtgaccgacccgaatgaacagcgggtcattgaacaacgtgcgcaaacggttgagggccgaactgatggtgggctggccgagaaacagcttttccgccacccgcgtcacattgcgctcgagcatcagtgcttcgaaaaccaccatcaaattgatgtcggccttgcgtagttcattacgattcatcggcgcctgcccctttccccaagacaagccgcagtttagaaagcccacggggctgcgtctatgcgcccactgttcatggcgtaacttaggggctataaatcagctgattaaggccacaggaacacaccgtgcttgccattcttgccttggtcaccctcttggccgggctctgtctctgggccatccggtttatcgcccacccgatcgcccgaacgttgttgagggtattcgtcggcctgtgcctggcggccaccgtggcgtttctggtgttggcgtggggcttccccatttcgttgttggtgtcttgacgccatttgattttttcgcaaggagcgctcaaccatgaaattcgcctacaccatcctctatgtgccggacgttgcggcctctttggagttcttcgaaaaagccttcgggttcagtcgtcgtttcctgcatgaatcaggcacctatggcgagctggaaacgggaggtaccaccctttcgtttgccgcccatgaattgggggagatgaatttcaagggggggcacgtgcaggcgcatgcgtcggggcagccgttgggcatggaagtgggttttgtgaccgaggatgtggttggcgcgcacgccaaggcgcttgaacaaggcgccttagagctatcggcgccgagtatcaaaccttgggggcaagtggtgtcttacgtgcgttgcccggatgggacgctggtggagttgtgcacaccgatcctggcataaacacacatttcatgtgggagctggcttgcctgcgatggcggctttacagccagcacatcattgcctgatacaccgtcatcgcaggcaagccagctcccacattttggtccttcatgtttgggctatcagggtttaagcggccgttcctggtcgcgctccgacagctctgtcccgtcatccggatgcttccaggtctggggtttctcttcctcatgacgccggggttgttcacgctccggctcatcgtggcgcttgcgttcgtcagccattgtcacctcccatccgtaagatttggtcacaccctcaagcatagaacagggtctacctttttgatgaattcggcgattgatagtcttcgcgcatcaatacatccaaattactcacttatcatttctaaatgtgtcagccactatccgcggtcttaagcgaaacaagcactttaaaaagaacgctggagacacaaaaccatgactagcccttccaggcccgcctctgcccgctcgaaagttggtgcggttttccgcgtgacttccggcaacttcctcgaacagttcgacttctttctgttcggtttctacgccacctatatcgctgccgcgttcttccccgccgccaatgaattcgcatcattaatgatgaccttcgccgtattcggcgccggcttcctgatgcggccactgggcgcgatcattctgggtgcctacatcgatgacgtcggccgtcgcaaagggttgatcgtaaccctgtcgatcatggccagcggtacgctgctgatcgtgctggtgccgggttatcacaccattggcctgtgggctccggcactcgtgttgctgggccgcttgctgcaaggcttctcggccggtgcggaactgggtggtgtgtcggtgtacctggccgaaatggccaccccgggccgcaagggtttctacaccagctggcaatcgggcagccaacagatctccatcgtggtcgccgccgcactgggctatggcctgaacgtgtggatggaaccggccgtcgttgccgattggggctggcgcattccgttcgccatcggctgcgtgatcatcccgttcatcttcatcttgcgtcgtaacctgcaagagactgaagagttcgccaaccgcaagcatcgcccgaccatgcgcgaagtgctggccacgctggtgaagaactggaccgtcgtgattggcggcatgatgatggtggcgatgaccaccaccgcgttttacctgatcaccgtgtacgcaccgaccttcggcaagaccgtgctgcaactgagcacctccgacgcgctgctggtgaccttgctggtggccgtgtcgaactttgtctggctgccgatcggcggcaccttgagcgaccgtttcggccgcaagccggtgctgatcgccatgaccgccctgaccgtgctcaccgcctacccggcgctgtcgtttgtggtcaacgcgccgagcttcgcgcacatgctggaaaccctgctgtggttctccttcctgtatggcatgtacaacggcgcgatgatcccggccctgaccgaaatcatgccggtggaagtacgggtggccggcttctcgctggcctatagcctggcgaccgcgatcttcggcggtttcaccccggcgatctccacctggttcattcacatcaccgaagacaaggcctcaccggcctactggatgatgtttgccgcgctgtgcgccttttgctcgaccctggccttgtatcgtcgtgccggcaaccgtgggcaggtcatgcaggaggccgcgtaatgcgcccgctgctcaacaccctgacggccctggccctcggcgctctggcgctgacggcccaggccgacgagctcaaagtgatgacctccggcggttttaccgccgcgtataaattgctcggcccgcactacaccgagaaaagcggcgataccctggacaccatcctcggcccgtcgatgggcaaggcgccggaagcgattcccaaccgcctggcgcgtggcgaacaggctgacgtggtgatcatggtcggctacgccctggatgacttgatcaaacagggcaaggttgacccggcgtcccgcgtggaactggcggactcgcgcattggcctggtggtgaaggctggcgcggcaaaacctgcaatcagcactgacgccgagttgaaggccgtgctgctcaaggccaagaccgtggcgtattcggacagcgccagcggtgtgtatgtcgagaaagagctgttcaagaagctcggcatgccagccaaaggcaccatgatcgagcgcatcccggtggccgaacaggtcgccaagggggactacgaagtgggcctgcaacaggtcgccgagttgttgccggtgccgggcgtgacgtacgtgggcaagatcccggaagacgtgcaatcggtgacgcgctttgcggcgggtattccggtcaacgccgaacacccggcacaggccaaggcgctgctgcagttcctggcctcgccacaggcacaaccggtggtgcaatccaccggcctggactcggtgtcacactgaccggaacggcatctcgcgcactaaccgctccaactccagcgccgctggcggcaatgtccgcccgcggcgttttatcaagccgacattgcgcatcacctgcggctccaccagcggcacactcaccagaatcgggtgcgtgcctgccggcattgcaatcgacggcaccatcgccacgcccaggccggcctccaccagaccgatcatggtggtcacgtggtgcgtctcgcagatgctctgctttttcacccgcacaccacgcaacgcctgatccagcaggaaacggttgccggacgttttgtccacggtgatgtagtcgtgctcgtaggcctcggcccaggtcacgctctcgcgcccggccagcgggtggtcacggcggcaggccagcacatagcgctcttgcaagagcaattcgaactccacctcatcggccaggctgccgctgaaacttacgccgaaatccgcctcgccgctttccaccgcgttgcacacttcaccggcactcgcgtccagtacacgcaagcgaattttcgggtacagcttgtggaattcggaaatcacgtggggcatgaagtagtacgcggtggaaggcacacaggcgatggtcacgttgcccatgcgcgtggaggcgacgttgctgatgcccatcaacgcgacgtcgaggtcatcgagcatgcgctccacttggggcaggaaagcgcgcccgaccatcgtcaggctgacccgccgcgtggtgcgctcgaacagcttcacgtcgagggccgactcaagcttctcgatccgccggctgagggccggttgcgagatacggatagcctcggcggccccgcggaaactgcccttgtccaccacggcgcggaaggcctggaggtcgttgaggtcgaaattgatgatcacgtgggttggccagtgtggtcgatttggcgggcattatcgtacgggtgggggtgaggcgccatgtgtgtcgctgccggcttgcgctaataaccctgctacaaatatgaagtcatacatatcagtgggttattgatctgccgaggccgcgagattgcagaattgcgtcaatacttgcggcctgacccttttaaagagagacaaccgcagccatggaaatctgccaaaacccactgcttttctggaccgacgacgagacgccggacatcggcatcggcccgttgctgcttgcgtcacgccaatggccgagtaggattgaatcctacccaacgcctgcggacgtcaaaatgcgctcaacccaacaaatgagtatcacgttgcctctcgagatggccgccctggtcaaggccaaggtcgcggccggtgaatatgccacggaaagtgaagtgatacgcgacggcctgagggtgttgctggcgcgtgaccgtgcgatggacgactggctgcgcgatcaggttatcccggcggctgcggcgctcgcagctaacccggagcgagccctttcagccgagcaggtgcgcgagcacatggctaccaagcgtcagcgaaaaggcattgagaaaccgtgagctactcggtagccttttcgcctgaggcgctggcgcaactcgacgcgcttgaagactacatcggccacaccggatcacctcttgctgcagcacgcctggtcgacaacatcatcggctactgtgaaagtcttgccctgtttccccaacgcggcaaccgtcgcgacgacgtgctgcctcatttgcgtatcacacactaccgccacaccaccgccattgccttcagggtcgagcctgacattcaaaaggtctcgatcctcggtgtgttttacggtgggcaaaattattcggcgctgttatcccatgacgaggaataaccccgttcacagcgtgctctacaaacaaggaagacaacaatgaacagcaccggatcgatgaatcgagcattgcgcgcgggattaagcctgtttggcttgttgggagccgccgccctgggcttcttcgcctggcaaagcttctaccccgtcagcgcggcagccggctggagcgtccagaccgtgcaccgtgatgtaccgaaagccgcctcgctgatgccgttaccggacggttcgttgatggtcagccaggaactcaatgacgccaagggcagcatcgtgcgcatacacccggacggcacccgcgaagtcgtcgtggccaacctgtcgaaacccgacggcatgttcgcgacccacggcggttgggtattcagccaggaaaccggcaacgcgcccgtgagttttctcaaggatggcgtggtcaccgaactgttccggggtgaaaacgtgcagggcttgtgggtcgaaggcgacgacctctacgccattgaggatcgcaaggaaaatggacggctgatgcgctaccgctggagtgaccagtcgctgaccgtattgcgcgaccagttgaacgaaggcgagtccatcgcacgttgtactgacgggcgcatgctctataccgaaaagaaaaaaggcgtgattcgcgagctgaccgacgaccacagcgaccctgtggtcgtggcaggtttgaacaagccgacattcctgatgtgcgatgaacgcgggctgtgggtcaatgaagactcgacgcatcgcgcgcggttgctgctgatagaccggcaggggcgccagcagacaatcctgtcgttcctgaaggcgccgcagtcgattgtgcgaatcggcgacggcacttatttactggcggaaggcggtcgtgaccgcgtcctgaaacttgtcagccaaccgctgacaattgccagcgaaggtgtgaagcactaagcccacatcgccaagagcccacctttgtgatgggctctcctcatattgcccactcttgcgggccaccgaaaaacgcctgcgcattgctgtccagcgtctccaggtggtacccgccctcctgcacgatcacactgggcaaccccagcccgcgtatgcattcgcccagtcgcgcgaacccgtcgcgcgtcaccgcgactttgctttgcgggtccagctcgtagatatcaaaacccagggacaacaccagtacatctgccgagaattccttcactgccgtcagcgcgagctccagcttttcaaagaacagcgcttcactggcgccatgcggcatgggcaggttgaggttgaaaccttcaccagaaccggctccccgctcttcggcgaaacctgccacaccggggtaaaagttggtggggtcgccatggatcgacacatacagcacgtcgtcgcgcgcgtagaaaatctcctggatgccttgcccgtggtgcatgtcggtatccagcacggcgacgcgctggaacccttcgcgcaggacctgcgcggccactgcggcattgttgatgtaacagaaaccacccgccgcctcgtatcgggcgtgatggccgggtgggcggcacaaggcgtaggcggcgggcgcaccctcgaggacgtccctggcggcagcgacagcactttgcgctgaccagtaagccgagcgccaggtcagttcgccgatcgggcaactgccatcggccaggtaacgcgcagcctgggcgagaataccgcgcagggcgttgggctcgcgcacgaagatgttggacatgacttcatcgccccaatcttcagggatttccttccagcgttggtgtgcttcctgaaggaaagccagataaggtgcgccgtgtacgccaagcaatggatcaaggccgtggtcagccggttgccggatatcgaaacccagtgtttgcgcagccaacagcaggttgcgggcgcgctcagggacttcctgcggcgtgcgcatctggccacgggagtagtagctgcgcggatggtgcaagagttgttcggggtggaagtaagtacgcatcaaatgctcctggataaccgtgcaacctgtgggagctggcttgcctgctcccacagtggattgtgttcagtactacaagactggatcgtcagccaacccggccggcgcgttgcagcaccgcgttcagcaatacgtcggtgccctggcgcacgtcttcgggcaacacatcttcggcttcgttatggctcaggccgcccacacagggaatgaagatcatcgccgtcgggcagtaacgcgccaggtgaatggcatcatgcccggcgccgctgacgatgcgttgctggctgtaacccaacgcgtccaccgacgcttgcacgcaggcaacgcactcggcgtcgaacggcgtggccgggctgatccagtgcgggctgatggtgatattcaggccgcgcttttcagcgatagcctgcaggcgtgcgcgcacttgttgctccatggcttcgatatcggcatcacggtgatggcgcaagtccacagtgaaattcagcaggccgggaatggtgttgcgcgaggacttggcaatgctcagttcgccaacggtggtcaggccttcgggggcgaaatccgccgcgaggttttccagggcctggatcattttcgcggcgccgtacagcgcatctttgcgcagtggcatcggcgtggtgccggcgtgcgcggccatgccttcgacacgcacatcgagccagcgaatcgcctggccaccggtgaccacaccgatgctcttggcgttgtcttccaggatcgggccttgctcgatgtgcgcttcaaagtacgcgtccaaggcaccacccagagggcgctcgccactgtagcccgtggtgcgcaacgcttgtgccacgctgacgccatcggcgtccaccgtggccagggccttgtccagcgccagggtgccggtgaacactgccgaaccgagcatggcgggggtgaaacgggcgccctcctcgttggtccacaccgcgatttccagcgatttgcgggtctgaatgccgtgatcatccaggctgcgcaatacttcaagaccggccaacacaccgtagacgccgtcgaagcggccgccttcgggttgagtatcgaggtggctgcccatcatcaccggggcagcatccttgtccgtgccggcgcggcgggcgaacaggttgccgatggcgtccacgctcagggtcaaccccgccgccgtgcaccagtggctgaacagttcacgcccggctttatcttcggcactcaacgccaggcggcaactgccgccgcgtgcggtggcgccgacctcggccatggccatcaggctcgcccacaggcgctcgccattgatcttcagcattacgcaatctccatcatttcaacgcgatgagccgtggcatggcggcgcgacaacgccaatacacacaccagcgagaccgccgcgatcaggctgtaaaacactgccatgggccaccattggccctggtattcatgggccagccaggtgccgatcaacggcgtgagaccaccggccagcgcgccacacacctgataggccagggaaatcgcggtgtagcgcacacgggtttcaaacagcccgctgacaaaacctgcgatcaccgcataaaacgaggccatgcacaccaccgccagcgcgatgccgaggatgatcagcggcgcctggccgctgctgaccagcatgaacatcggataaggcgaggccatcgccagcacggtcatggcgcagaggaaacgtgtggcgccaaccttctcggccacccaggcggccaagggttggacgcagaactggatgatggcaacgaagaacaggcactccagaatcagcgagcgcggcaggcccagctgttgagtgctgtaggcaatcatgaaggtgttggtgaaatacacacccgcgatgcccagcgtgttggcgccgatgcacagcaacagtgggcgccaagcggttttcaacacttcgatgactggcgcctggtccttcttgatcgcccgcgccttttcagcaagggctttatcttcaagaaactctggcgactcgttcacgcccaggcggatcgccaagccgacaatcaacaacaaggcactggccaggaacggcacgcgccagccccagctcagcaaatcttcttccggcaaacgcgtcaccgcactgaacgccagcagcgacaggatcaaccccgccgggctgcccagttgcgcgaaggacgcaaagaagttgcggcggcccttcggcgcatgctcgccggccatcaagaccgccccgccccactcgccaccgaccgcaataccctgcaccacgcgcagcaaaatcaacatcaccggcgccgcgacgccgatctgtgcataggtcggcaacaggccgatacacaccgtgaccacgcccatcatgaccagggtgatcaccagggatttcttgcgcccgatgcggtcgccgatgtgcccgaacacaatgccgcccaacggccgcgcgaagaagcccacagcaaacgtgccgaacgcggccatggtgctgaagagtttgtcgtcggaggggaaaaacagttggccgaacaccagcgcagcggcggtggcgtagatgtaaaagtcgtaccactcgatcatggtgccgataaaagcggcggccgcagcacggcgaggctgtggcgaagcggatggcttcatggggctggctcctttggttatttttttggcaggagaaggtcaaaccggtgcgctctgatggcgcttgttaagagtgatttatcgtcgcggggctatgattagtcaattttctatttattattccaattataaatcttgcttattattgagccgcaccatgtctgacattcgccgcgatattcacccattgctcaacgaccggctggattggaacctgctgcgcaccttccgcgtaatcggccaggagctgagcatcagccgcgccgccgcgcgcctgcacctgactcaacccgcgatcagccaggcgctcaaacgtcttgaagaacagctcgactgccagctcatcgtgcgccgtggtccacgcttcgtactcaccgaggccggtgagcagatcttcgccatcgccggcgagatgtatggccaggtgtcgcagatgagcaacgccctgcaaaaacccggcgatgaagtgatcggcaaagtgcgcctgctgatgatcagccgcatcaactccgacaccttcgatgacttcctcgccggctttcaccgtgaacatccgcgcgtggacctggacgttgaagtgatgcgcagctcggacatcgtcgctgcgctcctggaaaaaaccgccaccctgggcctgagcctcaatcgccgtgcacaaccgcgcctggaacagcacttgttcctgcgccagcgctatgcgtttttttgcgggcggcatcacccgctgttcgggcgcagcggtttggccgaaggcgatttacagtcggaaaatttcgtgagtttcaccagcgaccagattggcgggatgctctcgcccttgacgattttccgcgatcaacaaggcttcagcgggcggatcgtggcgtcgtcttccagcctggaagaagtgcgacgcctggtgattgccgggtttgggctcgggtgtttgccgattcatgtggtggcggaagatgtcaaaaacggcctgctgtggcggctgccgccggatgaagggatcgcggatgtggatattcatttgctgtggaaccgggagcaaaagatgagccgggcggaaacggtgtttattgaatgcctttcggcgcggttggcgtgcgagccacacccatgaatgtatttagagattcggctgacgcagttaccagacagctccctcagtgaagaccttgagaggtgttcgcccaacccctacagtccagaaggcctgcgcgtaacggcgcggtttgatcgctcatcactattcacataagctggacgccatgaacacatacccttcggaggctccgatggccactcccaaaaaagccgacaaacctcgcaagaaagccgtcagtgaagagctgaccttccttgatgttcggcaagccgcgcgtgatggccaaaaagtcttcgatacctttgtgatcagcggccagcttccaatctccaagcaggattgaatgcccgccgtcaaaatttctccgctgttccaagagatcaatcgttgggaaaatttcgccgcacacttttacaactacaaggtatgcggcgaacttccgaccatctttggcagagatgaaaatctcgacctcagtgatatgcaccacattcatctggcaggtacggcgagaaccgaggttcggtgggccaaaatcaagcgtcaatactatcgaacagccgcagcaaatgacccagcgaacgacttctggctcatctacgcctacgacgcctactgcgacagctacttgctactgacgatcatggggccagacgcacacaaccgcgccgagtggggatcttttttacgaacggtacataacgacctggtaaaaccctggatactgggacggatcacttatccggatattgatgatgactgaccgcgtaaatggcgtactttgcaagtcacctggcgccctcttgctagtgtaagaacaacgcccatcgaccatccttcgttcactggctgattcagccgtctcacacgaagaggtgttcacatgtccaaagtctggtttatcaccggcagttcccgtggccttggccgcgccattaccgaggcggctttgcgcgcgggtgatcgggttgcggccacggcgcgcagccctcgccaactggatgatttggtcgccgagttcggcgatgcggtttacccgttgccactggatgtgacggacaacaaacaggtggctcaggctgtggacgccgcagtggcacactttggccgtctggatgtggtggtcaacaacgcgggctacggtgatctggcatcggtggaagatgtaacgccggaggatttcaaggcgcagatcgataccaacttttatggcgtagtacacgtgagcaaggcggttgtgccggtactgcgcgcccagggcagcgggcatatttttcaggtatcgtccctgggcgggcgtattggcatggcgggcctggcggcttaccagagtgcgaaatgggccgtcggtggtttttcgacggtgctggcgcaagaggtcgcgccgctgggcgttcaggtaacggtactggagccgggtggcatgcgcacggattggtccggcagttccatgacgattgctccgatcagtgaaccttaccagcaaaccgttggcgcactggttgaactgctcaactccccgggcattctgccgaccggcccggcgcgggttgccgagatcgtgctggagttggccttgagcaaagacgcgccgttgcgtttgctgattggcgcggatgccgtgcaatacgcggccagggcagccgaagacttggccgcttccgacaaaaaatggcatgacctcagcgtgtcagcctccgactgatgtgatcgtttgaccgcaaggtgccccatgcctgacacacgccaatcgcgcttcaacatcccggatattttctggcaagccttgagaaacattgggctggagccgtctgcggtgctgcgtcaggcgcggctgcccgtgcccctcaacctgcatgagcgccgggaccggcgccaggtgacaactgcggagttctttcggctgtgggaggcagtgagcgtgctcaacccggatccggccgccggcgttttgctggtcacccaactggagagcacaacactgccaccgtccagttttgcggcgtttattgcgcgtgactttcgcgatgggctgcaacgtctcgcccgtttcaaacagttgtgcacgcccgagcgtgtgcggctgaccgaagagggaactacctgcaccgtcactctcgattggttgcgcacccaggaaccctctccaacgttattgatcgacgcggcatttgtgacgttcgtcgagttgggccgacggggctccggggttcacatcgttccgcgcagtgtcgaactcgcccggccgaaaaacggcaacaccgcattggccgatttcttcggttgcccgatacgtttcggtgccgaacgcaatgccctggtgttcaagggtgctgacttggatcggccgtttccgggccacaaccctgaactgctcgaaatacttaaccccgcgctggtggcggcactggccgaagcgactgcgcccaccaccgtcagccatcaggttaaaaacgccctcaagcgcatcctcgccagcggccggcccgaaatggtcgaggtggcgcggaaaatgggcatgagcgagcgcacgttgcaacgccgcatcaccgaagaaggcaccagctttcgccaactgatgctggagacacgccaggaagtggtgcgccatctactcgccgagccgtctatcgaaattgatgagattgcgtgcctgctcgggtacgaagacaccaactcgttctatcgggcatttcgctcatgggaaggcacgacacccgctcgctggcgggcgacgcagttgccttcaactcactagtgtcttttcaacactgccggccatgatgtgcagatcctcgaaggcgtttctgccgatcaacatgaaagcatgggaaggattggaccaaaacaccacgttcatcccccgacgttgttcagtggccatcggctgcgcgccctttttactggccgtgatacacagtgccagggggccgtggcgtgagtccagataggtcaattggccgatcagtacgctgtcatagtcaagaatctgcgcacgccggaactcggcgccgggcaagctcacggacgcaatggacaaaggcaaacccaactgcgcgcccacggaactgagctgggcaaggtgcgaggcagggtcggcgctgaggttttccagcgtctgcggcgtgtacaaggccatgtattcagcgactgacgcgcgccagccctggccggattctgtgcggggccagctcaggaccaggcgatcggcgatcacgccggcgaccgcaaagcttgcggcgacggccaaaaagctgcgccggctgagggtcgcggtttgtgtcggcggcaaagcgttgagcatggcctgcaagcgcccggcaggcgcctgatccagcatcgaatcgaacgccgttttgaacggcaagccaatgcactgcaatgcttccagacgtgccgccagatcagggtctgcctgaatctgcccggcgatgagccgctgctggtcagcgtccaattcaccgtcaagatacgccaccaacagttcgtcgggcggtgcgttcacgtcagtcatcgccgttctccgctgcttttttccggcaaggtttttggcgggttggtttctgcaagcttcaggcgtgccgccgctaaccggctcatcaccgttcccaccggaatgtgcagcacctcggcaatctccttgtaggaaagcccttccacatacgccagaaaaaccgtttcccgctgcgcttccggcagcccgttcacacgcttgatcacttgtgcagccaacacgtgctcctgagcctggctttcgccgtcgaacgacaacgcctgctcggcatcgacaaaaccctgcccttgcctgacgcgctgcgagcgcagttcgttgagccagatcgagtgcatgatcgccagcaaccagcggtccagccgcgtgccgggcgcaaactgcccggcacgttccaacgcgcgtacgcaggtggcttgcaccaagtcctcggccacatgcttttgtcgcgacaacacccacccgtatcgccataaacgcggcaatagcaggcccaactcacgacggaactcagcctctgtggtgatggctgccccctgcccgttcacacatggatgatcaagcctgcggcgcggcggcgatggcttcggccaggtcttcgtattcttcgcaggtggcgctgcacaaggctttgattttcaccaactgctcctgggccaaatcgacacggcccttgatcacataggcctcacccagatactcgcgaacctgtgcgtagttggggtccagcgcgaccgacttaaggtaatagctgatgccttcatcggtgcggccaagtttgcgggtggcatacccccgataattgagggctttggcggtattcggctcttgcagggtgtcgagcagggacagcgcctcctcgtaacgcccatccttggcaaggcggtacgcgtaatcggtgcgatcagcatctgaagtagccttgctggtttgcagcacgcatttgccggttttggtgtcccagacctggcccttggggcagttgggtttgggcggcgccgattcgtcgcctgaggcgcgggcctggcctgccaacaaagcagccgccatacaggcgccgaaaaacagcgcggtacggtaggtgatcgggtgttcctggcggttcttcatggcggtcatgctccgtaacgagagggaagtacagcagcaatgttcatttttgaagagcgccgggcagcatacggcgcaaggtgttgtcgcccttcacaaagtgatgccacagcgcagccacggcatgcaggcccgccagcaaaataatcgcccaggccacattgttatgcaggccgccgagggtggcgcgccattcgtgatcaatcaccaggggcgccgggacggggaacagcccgaaaaagttgaacggttcgccttgagcccaacggaacagaaaacccaacacaatctgagccagcaacaacaggtacaggcaaccatgcgccattttcgccagcaggttaagcgtggggtgactgtcggctttggggcgattgccgccggacaggcgccagataatccgcgccgcaatcagcacggccatggcgatacccagggagatatgcaccgattgcaggcccttgcgcagtggcgtgcctttctccaggttttcccaaacatgcgcgctggcgaacatgaagatcacgacggcggcagtcagccaatgaaaggttcgggtcaggcgatcgtagcgggcgacggaggtgttcatggacgtttcctgggtggtctgtggggtgaacaccacagcgcaggaagatattcggtgaggcggtcattatttatttcataacaggcctgccctgcaaaaaaagccccgtcgcgcgctcggcgacggggcttattggcttatcggttgttgcagatcagttgccccgctccttgttggccagggagagcactgaggccgcaagggctttggtttcctcgctgtacttttcgctgccgagcacttttccggccttttcctccatctgtgcgctcgtctccttgtcggtgcctttctgagccagcgccgacgccgcgaggcttttggcaatggcagaggatgctggattgctgagtgtctcagccgccagggtggcgatcttgccggaggtttttttcgtgtttttgctcatgacgcaattcccttgcagttgaaagcgccgtgtttggcgcgctaccacaaagtaatgagctactggaggtagcgcaatgcgccacctgtaggcaacgttttggaagcctgtatgaaagccgcatcaatggtgtagtgcgggctagagcggtgcatcgattgcactgatgattactatcgaaacgagcgcctgcccgattttcagcactgattcctataatcgcctccactttccctccccctcgcctgacttcaggcgacgttcaccctggaacccgacatcatgccaagtgccagccaggcccctcgcggcctccccgaacataatcagcagagtgtcaaacagcagtggctggcgatactctcagtcgcagtcggcgcgttcgccctggtgaccagtgagtttctgccagtgggcgtactcaacgacgtcgccgccgacctcggcatcagcgccggccacgccggcctgatggtcactctgcccggcatcatggccgcactcgccgcgccgctgctgtcagtcatcatcggcgccatggaccgccgctacctgctgatcggcctgacgctgatcatgatcgtcgccaatatggtcgtggcctacgccagcgacttcagcctgttgctgttcggccgcgtgctgctgggcatcagcatcggcgggttctgggcgacagccatcgccctcagcggccgcctggcccccaacggggtgggtgtggcgaaggcgacatcgatcatcatgatgggcgtgaccctggccaccgtcctgggcgtgccggtcggcacttggctcagcggcttgatgggctggcgcatgacgttcctggtcaccgcgttgctgggcattccggtgctggtggcgcagttgttcctgctgcctacgctcaaaccggaaaaagccattcttgtgcgtgacttgccggccttgtttatcaacccgcgcgcgcgggtcggcctgatcgctgtgttgctgatcggcctggcgcactttgccgcctacacctatgtggcgccgttcttcaaaaacagctccggcttcgacggcccgaccattggttcactgctgctgatgtttggcgtagcaggcgtggcgggtaacgttttcgctggtttcgccgccaaccgcagcgtgcgctacacgctgttgctggtcgcactgatgatcggcaccagcaccgccctgtttccgtacttcgccaccggattgaccggcgcaaccatgctcatcgcgctctggggcttcgccttcggcgccttcccggcttgcgcgagcatctggatgtttgtggtagcgcccaaggatgtggaacgtgggatgccgctgttcgtggcgttgttccaggtcatcatcgcgctgggctcattctttggcgggcggatcgtcgaccagatgggtacgtccgtgctgctgagtctggccacggcgttggttggcgtgggttttgtgacggtgctggtgctgggccgaaatgtgagcaacagcttggcggcgcagcctgcttaagaaggccgtgcttactgaaaagcctgctgagcgttgagcttggcaggcttttttgtttaattcagacgtgcgtctttgccggtgttcggatgtctcgcatccttagtcaggataaacgagctgaaggccaggaaatcacccaagtgctgagtgatgatcgcaaccgtgatcggcaactgaagggtttgatactcgtgcactgcaatattgcgaaaacccaccatgttttttaggctggtcaacagagacgaatcaacccacccgccccgcgatagcagttcaaacacgtcacgtgcgctttgaggaacgcctaacctttctcgacgaatcagatgttgccccatatccaacgcagcttcacacgcccgttgaatattaagaattgcggcatcctggcgagtaaagtcagtagagaaactggcagggcccttgtcgtattcctcacgagcgcgagcgacgcaacgctcaatgcttgaggctttgttgacgagcacatcatcgaccatgcacttttccttccttctgaacatcagtcagcagccctgccctcgcagcgtccagcgcggttttctcactaagaacgtagctctcgaagatacctgcctggctgtctttattccagagccgacgccctgttgttatgacctgatattgcatcacggtcgaggcaacccgcagatcgagcaaatcgacaggcatacccacaatgtcagcgacttctccagctatctgccatagcagcagcggatctactgaaccagcagcgagcaccgccaaatccaaatcgctatcagcgtgcgtctcacctgtcacctgacttccaaagacatagacagccattagctcaggaacacaggccagtaaatgcgccaacaccggtttatcgttcatgttgcggcccgcagtgtcatctgatgaatgaccgtagcagaatttgcccggaaatttctgcctcaaacaaaaagcccccgacaacaattaagttatcgggggctttttgttattcaataatggcggagagatagggattcgaaccctaggtaccggtgaaggtacaacggatttcgaatccgtcccattcggccactctggcatctctccaacggcgcgcatcataacagtgtgtttctcggaagcaaaccccaaatgcgatttttttccgtgctatcagatgcttgcgtcgattaaagcggtacgcccagacggttggcgacttcttcgtaggcttcgatcacgtcaccgaggccctggcggaagcggtctttgtccatcttcttcttggtggccttgtcccacaggcggcagccatccgggctgaattcgtcacccaggacgatggagccgtcgtggaatacgccgaattcgagtttgaagtcgaccagcagcaggcctgcgtcatcgaacagcttgctcagtacgtcattgaccttgagggacaattctttcatgcgcgccagttgctcagcggtgccccagccgaacgccaccacatgggattcgttgatgaacgggtcgcccttggcgtcgtccttcaagaacagctcaaacgtgtaagggttgagcttgaggccctcttccacgcccaggcgcttgaccaggctgccggcggcgtagttacgcacgacgcattcaaccgggatcatgtcgagcttcttgaccaggcactcgttgtcgcccagcagtttgtcgaattgggtcggaacaccggccgcttcgagtttctgcatgatgaaggcgttgaacttgttgttcaccatgcctttgcgatcaagttgttcgatacgcttgccgtcgaacgccgaagtgtcgttgcgaaacagcaggatcaggcggttggcgtcgtcggtcttgtacaccgacttggctttgccgcggtagagttcttcacgtttttccatgatgggctccgcttgctaaatggtgggctaggcgatgtgtcgccagtcgagccctgaatcttgatcggccagttgcagccagtccgggtcgcacccgagggtgtcgacaaaacattgccgggcaagcgccggcaggttgttcttgctgctcagatgggccaggaccaggtgttgcaagtcttgccagcccaactcatacaccaggtacgccgcctggtggttgttcaaatgtcccagttcgccgcccacccgctgcttgagaaagtaggggtagtgaccgcgcgccagcaagtcccggcagtggttggactcgatcatcaaggcatcgaggtcgcggtaaccgtccagcactttggagcaataggagcccagatcggtgagcacgccaaaacgccgttcaccatcgctgaatacgtattgcgtcggctcctgggcgtcgtgcgccacggcaatcacatcaatgctcaaggcaccgatttgaagctgttcgccaccggccaggaaacccgcaggttcaatgggtttgcgcatcccgcgcagagtgccgcgactcaggtacaccggaagattgtagcgccgagacagcaaacccacgccatgcacgtggtcggcatgttcgtgggtcaccagaatcgcgctcaactgcgcggggtgaacccccagacgcagcaggcgccgctcggtttctttcagcgagaaaccacaatccaccagcacgtacgtgtcgtcatgagcgaccagcgtgccgttcccttggctaccgctgccgagaacggcaaaacgcatcggatcagcccaggttgtcctgaatcacgcccaacactttgcgcgctgtatcagccggcgcaacggtgttgatgttcttctcgacggtgacttgtacgctttcgccaaccttgctcaaacgaatctggtaacgctcggcacgggtttcgatctcttccttggtcggcgcgctgccgaacaatttaccgaagaagcctggctcgtcgtctttcttcacggccttttcagccacgttgatgtagtacaggcccaggctgcggttgatgtcttcaacacgccaaggacctttttccagtgcgcggccgacgctggcccaggcacgatcaaggtcttcacccaggttcaggaccacgttgccgctgccgtcttcggtgaggctgacgcggttaggcgtgtcgtaatcacgtgcggcgagcagggataccgaaccgcccttctcggagatacggctcatgctggcaagcatctcgtcgaccagcgcggcgtcaacgcccaggttgaccgagcgcggcgtgaagtcgacgttggcagtgctgccggcaggacgctcggcgctgaccacatagacttcactggtgttgcgctgcacgccaggctcgatgcgcacacgcacacgggcttcgctgtcagccgctacgccgccagcctgcaggcgctgggccatgttggcggacagttcgctgccacgctgccaggcagtggtgaactcgccggtctgcgggcgctgttggtcgatgcggaaaccgttgtcctggaagaactgcaacgccacaggccagacttcggcaggtgggcgctgggcaatgatccagcggttgtcgccgctcttctgcaggctgtaatcgctggcatccgccaccgccgagatcggctgcggacggggcaccacgtactcgcccttggcggtatcgtcggcgacgttgcgcggaattggcagcaacgggtcaaggcgcttggcgacattgacgtccggtggcagttgcatcggtttggttgcttgcgcttccaggtaatcgctgccgcggtcacggaagtagccttccgggccccagatccaaccgcagccactggtgctggagataatcaaggcaagtgcggaaagtccggccaatcgcttcatgcgtagtgcttcctcaattaaaccaggacgccggactggcgcagggcctgtcgcagcggttcgtgacaggcttcgctgagacgggtgagcggcagacggataccgtccggcatcaggcccatctcgaacagcgcccatttcacggggataggattggattcgataaacagtgtcttgttgagcggcatcagcttttcgtggatttcacgggcttttgcagcgtcaccggcgatggcggcggcgcacatgtcgctcatggcgcgcggggcgacgttggcagtcacggaaatgttgcccttgccacccagcaggatcaactcgacagcggtggcgtcgtcaccggaatacaacaggaaatcgctgctcacgccggccaggatgtccttggcacgctgcaggtcgccagtggcttccttgatgccgatgatgttcggcacggtggacaggcggatcacggtcgcagcctgcatgtcgcaagcggtacggccaggcacgttgtagaggatctgcgggatgtctacggcttcggcgatggcgcgaaaatgctgatacaggccttcctgggtcggcttgttgtagtacggggtcaccagcaggcaggcgtcggcgccggccttcttggcgtttttggtcagctcgatcgcttcacgcgtcgagttggcgccggtaccggcgatcacggcaatacggcccgcaacacgcttgaccacgaattcgatgacctggatgtgttcttccacatcgagggtggccgattcacctgtggtgccgaccgccacgatggcgttggtgccctcttgcaggtggaagtccaccagtttgcccaggctatcccagtcgagatgaccttgtgcatccatgggtgtgaccagtgccaccatactgcccgcaatcatgcaaccgctcctgccggaaaaagagagccgtaatggtactggcgccaagatgcttgtacaagcgaagtaccgcgcgaggatgcgttctgaaccaactaaacgacgggcaatgccatcattgggccaaagcctggctcgaagcacgctgaaatcagaccgatcgcgtaatgaaaacgccacctcctagcccttggcgacgcttttcgctacccttcatcctttgatcgatacagcccacacggtatcgaccgctcatcgctttaggaaggctgcatgtccacccccacagttcgcgaacaattccttgttatcagtgccctcggcgccaaccccatggagctgaccaacgtcctgtgccgcgccagccatgagaaccgctgcgccgtcgtgacctcccgcctgacccgccatggcgagtgcagcgcactggtcctgcagatttccggcagctgggacgccctggcgcgcctggaaaccggcttgccgggtctggccaagaagcatgatttcaccgtcaacgtggtgcgcagtgccgcgctggaaaaccgcccgcaggcgctgccttatgttgcctacgtcagctcggcctaccgttcggacatcgtcaacgagctgtgccagttctttatcgaccacaatgtcgagctggaaaacctgacctgcgacacttaccaggccccgcaaaccggcggcaccatgctcaacgccacgttcaccgtgaccttgccggccggtgtgcagatcagttggctgcgtgaccagttcctggatttcgccgatgcgctgaacctcgacgcactgatcgagccatggcgcccacagaacccaatgtaaggaagttttcatggctgtagtcatcgacacaccggtagccgacttcgaagcccaggccaccagcggccagaccttcagcctggcaggcctcaagggcaagcaagtggtgatctacttctacccgaaggacagcaccccgggttgcaccaccgaaggccagggtttccgcgatcagtacgctgcgttcaaggcggcgaacaccgaagtgttcggcgtgtcgcgcgacagcgtgaaatcccatgaaaacttcaagggcaagcaggaattccccttcgagctgatcagcgacaaggacgaagcggtttgccagctgtttgatgtgatcaagctgaagaaactgtacggcaaggaatacctgggcgtggatcgcagtactttcctgatcgacaaggatggcgtgctgcgccaggaatggcgcggtgtgaaagtgccgggccatgtagatgccgtattggccgcggcacaggcgctgcacaaggcttgaaacgcggcgggctgttgtagtgagcgggcttgccccgctcactacaacaatggcgcgacgacgggctcttgccgtggccacgcgtcgagcactgccttgaacagcgtcgccaggggaatcgcaaagaacaccccccaaaaaccccacaacccaccaaacaacaacaccgcgcagataatcgcgaccgggtgcaggttgacagcctccgagaacagcagcggcaccagcacattgccatccagcgtctgaataatgccgtacaccgccatcaggtagatgaactggtcactccagccccactggaacaacgcaatcagcatcaccggcaccgtcaccaccaccgcaccgacatacggcaccaccaccgacacgcccaccaataacgccagcagcgctgcgtagttcagcccgagcgcgacgaaggcaatgtaggtgacgccgccacagatgacgatctcaatgaccttgccacggatgtagttggcaatctgccggttcatctcctcggccacgcgggtgatcaatgcccgttcacgcggcaggtaaccgcgcacccagcggccgatcattgcgcggtccttgaggaagaaaaacaccaggatcggcaccagcactagatagatcatgatgttgaccagcagcggcaggctggaaagagaaaaggtcagcgcccattgcccgaattttccgatctcgccgcgcgcaacatcgatggcctgcagcacctgctcgtcggacaccagatgcggatagcgttccggcaacaacagcaacaaggattgccatttggcgagcatgcccggcaactcgttaaacaaggtgatcaactgatgccacaacaacggcaacaccaccacgatgaacaccaccagcaagcccatgaacagggcaaataccaaccccaccgctaccccgcccggcaagcgcaagcgctcaagcgtggtcaccaggccctgcatcaaatacgccagcaccatccccgccagcaccggcgccagcatgccccccaaggtaagcacggcggtaaaggccaggaacagcaggacagccaacaccacagcttcttcatcggaaaagtagcgctgaatccagtctcgtaacactttgaacatcaatcaacctcggacggtgagtgcaaacggttcaggccttgcgcaaccaatattggtaaacaccggcggcgtcttcttcgtgcaacaacgtgtggccggccagcttggcgaaggtgcggaaatcacgctgggagcctgcgtccgtagcaatcaccttgagcacagcaccactggccaaccgattgagttccagcttggccttgagcagtggcaacgggcaattaaggccgctggcatcgagttcggcatcaaaggctacagcgtcggtcatggttttactccgggcatgcatttgggctgcttagaatatctggtccgaagctcagtgtccggctacagtaagctctttgtcgaaaggctctgtgcatgacttttttgcgccctaccctgctgacgctggcttgcctgctggcctctccaggcttcgctgacgacctgccgtcacttggcgacgccagttctgccattgtctcgccacaacaggaatttcaactgggtcgcgcgtggctggcgtacctgcgcggccaggtctcgcaactcaatgatccacagctcaaggattacgtcgaaaccagcgtgtacaaattggtcgagaccagccaggtcaatgaccggcgcctggagttcatcctgatcaacagcccgcagctcaacgcgtttgccgcaccgggcgggatcgtcggggtcaacggcggtttgtttctgaatgcacagaccgaaggcgaatatgcctcggtgctcgcccacgaattggctcacttgtcccagcgccactttgcccgcggcgtggaagcgcaatcacgcatgcaaatcccgatgatggcggctctgttgggcggcatcatcgccgccgctgctggcgccggtgacgcgggtattgctgcgattgccggctcgcaggcggccgcaatccaggagcaacgcaggttctcccgacagaacgaacaggaggctgaccgtatcggcatcctcaatctggaaaaagccggttacgaccctcgctcaatgccgaccatgttcgagcgcctgatgcgccaataccgttttgacgccaagccgcccgagttcctgctgactcacccggtaactgaatcgcgaattgccgacacccgcaaccgcgccgaacaggccaaacctggcggcaaggaagacagcctgcgctatcaactgattcgcgcacgcgtgcaattgcaatacgaagatacgccaggcctcgccgccaagcgcttccaggcgcagctggacgagaacccgaaaagcgatgtagcgcgctatggcttggctatcgcccaaatcaagggaacaaagctcaaggaagcacgggaaaccctggcaccgctgctggccaaggcgcccaatgacatcacttacaaccttgcacagatcgagttggacatcaccagcaatcgcttgcccgatgctcagcagcgcactgatcgaatgctcactcaatatcccggcaactatccgctgaatcaggtgcgcgtggacttgctgctcaagcaaaaccgtaccgccgatgcggagaaggcgttggacggtttgcttaaatcccgccctgatgatccggatgtctggtatcaggttgcagagacacgtggcttgtccggcaacatcatcggcttgcatcaggcccgcgctgaatactttgcgctggtgggcgacttccagcaagccatccagcaactggactttgccaagcgtcgggcgggcaacaacttcccgttgtcctcacgtatcgacgcacgtcaacgtgagctgatcgaacaggaacgcctggtaaaaggaatgatgagctaaacccatcgcccacaaaaaagccccgccttcgtctatcgaagtcggggctttttgttggatcaggctagcggattactcggccagcttgaaggtgatgaagcttgcacgcccttgacgcagaacacgcatcgataccgagcgattcttcggcagcgccttggcgatgtcggtgaattgcttggtggagtcgatggcctgattgttcaggtgagtgatgacatcgcctggctgcagcccaatcagggaggcaggaccgtcctgcacttccttgatgaccacaccgcttttgaggtcgaagctcttcttctgctcatcggtcagctcgacaacagcgatgcccaggcggttgctgctgcgctcggcaccgggtttagcgttgcccagagcgtccagggttgcgccttcttccgggatggcgcctacagtcagttcaaccgtctggcgcttgccatcacggatcacttccagcttggctttgctaccagccttgagtgcgccaaccaaatgcggcaggtcagcagacatgacgatcggctggccgttcatgctcagaatcacgtcaccgacttgcaggccacctttggcagccgggccgtcgtcctgtatctgagcgaccagcgcaccggctggcttgtcgagaccgaaagactcagcgaggtccttgttcacttcctgaatcactacacccaaccagccacggctgactttgccgccgcttttcagctggttggacacgtccatggccacgtcgatcgggatagcgaacgacacgcccatgaaaccgccggaacgggtgtagatctgcgagttgatacccactacctcacccgccaggttaaacagtgggccaccggagttacccgggttgatcggcacgtcggtctggatgaacggcacgtagttttcatttggcaggctgcggccaatggcgctgacgatgccctgagtcacggtatggtcaaagccgaatggcgagccgattgcgacgacccactgcccggctttaaggtcttgggatttacccagcttcaaaaccggcaagtctttgccttcgattttcagcaaggccacgtcggaacgcgggtcagtgcccaccagcttggctttcagctcactgcgatcagccaggcgcacaaggatttcgtcagcatcggcgatcacgtgattgttggtaaggatgtagccatccggcgaaatgatgaaacccgagcccagggactgggcttcacgctggccaccaccgccaccacgaggagcacgctgctgcggcatgccacgttcgaagaactcgcgcagcatcggcggcaggccttccaggtcgggcatctgctggttcgagactttacggtccggcagtttctgcgtggtactgatgttcaccacggcaggcgatgcctgctcaaccagttgggtgaaatcaggcagctcggccgcttgcgcggacacggcctgacccagcaccagcaccgtggcgactatggataggtaagacttcaagcgtggtatcgacatacagctcccgttacgacgagcagggttgagcgacagggttcaagaaacgccgaaaactgcgaccgacatctttgttccgcgaacaaaacaaggccagggccgacaagccctgacctataaaaaacatggggattatttgcaagtgaaaatgctgatccagacatttcatgctctcggcagccaacctggcatgggcgtaggttgaaacgtcaagatgaacataggattaacgactcacggcttggcggcgggcttttcaccgcgcactgacagcgcgatgcgctcggccgtaccgatgggtatttcgccgacgacggttaccatcacttcgccatctaccgtattcaaccgccgggatacagcaactgtagggccgagttgagtgcgggtttccgtcacgctcgcaccgtcggtcgattcaagaaacaccgaaaagcgtgcaagcccgtcgtcatacatcaggctgtcgacagtagatttggtttgggcgtcttttcgggaaatgctgttggtcagctggaagccaggcggtagccaatccagatgccacgcctgggtggcaggcacttgcggggctttgttgctggtcagggcaatgggtgtgcattcgtcactgggctgcaagtcgcgatcagtgagcgctgtcgatgtattcagacgcgtgaattggaagcgctccagcaactgcccctgatcattgagcaaaagagacttcagcggcaagccggtttcacgatcaagatgcaactcaaagccataacggtattgatcacgcggcgtaatcgacacaatcactgcattacgaccggccacgcgcgatttgccgataacggccagttcataaaattgagtaagcttttgcggatcaagtgcacgcgagggcgcatcaggcgaattaccgatgccggcaacgagggtgccactgacgcattgggtgcgaccgtcgacccggacaacttcctgagcagagccgtcgagctgcaacaaccgctcgcgaacctgaccattctggacgcgatgccagatgtcatgggtagaaaaactaccgttacgctcgtaaacgaacgtaccttcgaagctttgctgctgctctgcacgcccaagtcgattaagccagtcctgcgcttcatcggcatgggcggatagtgcaaaccaactactgagcaaaagcgtaaggagcggtatggcgcgcatagggccccttagcggttcagcggttttccaggcttgcagcacgagcgtatggcagagcgctttcagtgcctttcaaggctgattcctgtgcatgttggcgcaggtagcctggaagacgctgatcttgccaaccggattgcccctggagtacaccgttggccatggggccggtggtatccgagctttccttgtagccggccaataccgctggacctttgacttgcggaccggccatgaccggttgctgagtctgctgggccaattcggcacccgcgatttcgtcctggttgtacagacgaacacccgccaacacagccacagtcaccgaagcagctaccgccaagcgacccaggctacgccatggaccacgagcagcttttgccggaacggcttcatcagccagcgcagcagaaacggccgcagcaatatccagacgagggattagtagatccttgtgcatcaccgcccgagcgacttggtaacgagaccaggtatcacgggtttcggcatcatcaaatgcattgagcactcgacgaagttccagttcatccgcttcgttatccatcactgcggacagcgattcctgcagggcatcacgactcatggcggttcctctcttggctgtcgccgctgtctttagttctcttgcaacaagggttgcaaggctttatcgatggcttcccgggcccggaaaatccgtgaccttacagtccccaccggacactgcatgacgctcgcaatgtcttcgtaactcagaccatcgaattcacgtaaagttaacgccgtacgcaaatcttctggcagttgctgaatcgtgcgatgaacggtgccttcgatctcgtcgcgcagcaaagcacgctccggcgactcgagatccttgaggccgtgatcaccatcataaaattctgcatcttctgaactgacatcactatccggtgggcggcgaccgcgagagaccagatagttcttcgccgtattaatggcgatgcggtagagccacgtataaaacgcactgtcaccgcggaaattgcccagtgcacggtacgccttgataaaggcttcctgtgcaacgtcctgcgcttcatgggtgtcgtgcacaaaccgcacgatcaacccgagaattttgtgctggtatttcagcactagcagatcaaatgctcgcttgtcgccgcgttgaacgcgctcgaccagctgctgatcctcttcctgggttagcatgaacactcctcgttgtacttgaaggaggcttgcataactaaacgatcaggcttgcaaacatagactcggacttttcgcaaaagttctcccccttcaagcaagtttccggcacgcactgatttggcacacacgaaaaacgcagcgcgggcgacgccggctgcgcgaataatcttgtcgccggttttctgacgcgtccgatgctgccgacgggccaataaactcaacgttttcccagctttcgggcaacctgctattgagtcggggcttatgcaaaaagttcccgcgccaacaactggccgactttatcccggctgtgcaccgtaatctcacattgccacgaatgccccgctattgtgccgctccccccctctatatactagtggcccgtgtgaccctttgattcgccgatccaggcgtcctgtttgcgccaccccttcggatcgctttttgcggaatccctcaaatgagccaacagtttcaacacgatgtcttggtgatcggtagcggcgcagctggattgagcctggcactgacccttcccagccatctgcgcattgcagtcctgagcaagggcgacctggctaacggctcgacattctgggcccagggcggcgttgcggcggtgctggatgacaccgacaccgtgcagtcccacgtcgaagacaccctcaacgccggcggcggcctgtgcaacgaagacgccgtgcgcttcaccgtcgagcacagccgcgaagccatccagtggttgatcgaccagggtgtgccattcacccgtgatgaacacgcagggagtgacgacggcggattcgaattccacctgacccgcgaaggcggccacagccatcggcgcatcattcacgccgctgacgccaccggtgccgccatcttcaagacgttgctcgatcaggcgcgccaacgccccaacatcgaactgctggagcagcgcgttgccgtcgacctgatcaccgaaaaacgcctgggcctgggcggtgaccgctgcctcggcgcctacgtgctcaaccgcgccagcggcgaggtcgacacctatggcgcacgcttcaccattctcgcctcaggcggcgcagccaaagtctacctctataccagtaaccccgacggcgcctgcggcgacggcatcgcgatggcctggcgctcgggctgccgggtggccaacctggagttcaaccagttccaccccacctgcctgtaccacccgcaagccaagagttttctgatcaccgaagccctgcgtggcgaaggtgcgcacctgaagctgcccaacggcgaacgcttcatgcagcgcttcgacccacgggccgagctggccccacgcgatatcgtcgcccgcgccattgaccacgaaatgaagcgcctgggtatcgactgcgtctacctggacatcagccacaaacccgaagccttcatcaagacgcacttccccaccgtctacgagcgttgcctgaccttcaatatcgacatcaccaaaggcccgattcctgtggtgccagctgcgcactacacctgcggcggcgtgatggtggacaagaacggtcgcaccgatgtacccggcctgtacgccatcggcgaaaccagtttcaccggcctgcacggtgcgaaccgcatggccagcaactcgctgctcgagtgtttcgtctatgcccgctcagccgccgccgacattctcgaacacctgccacgcgtccctgtccccgccgccctgccccgctgggacgccagccaggtaaccgattcggacgaagacgtgatcatcgcccacaactgggacgagctacgccgcttcatgtgggactacgtggggattgtgcgcaccaacaagcgcctggcgcgggcgcagcatcgggtacggttgctgctggacgagattgatgagttctacagcaactataaagtcagccgcgacctgatcgagctgcgcaacctggcgcaagtggccgagttgatgatccgctcggccatggagcgcaaggaaagccgaggcctgcattacaccctggactacccgcagatgctgcccgaggcccgcgacactattctggtgccagccacctacggcgactgaacttcaggcgaacccgcaggcgccgatgcagatcggcagcctgcgaatccctcggcacacagatcgaccgcacacgccattcgcccggcaggcggtagcgcagcacgatgatcagcggcaaggccaggctgtcgggacgtaactgcacactgtgccaaccccgatgacgactgaacaactgccaaccctcttcgtcgcggcgcaggccacgaatcgacgaacggtgggtcagcaggatatgtcgcggcaaggcccacgcggcatgcgccaggcacagcagagtacccaggcttgaataagccagatcgacaacaaacaaggcacccaacgcgaacagctgagcgagcagatacgccgccagcaacagcccggaggcctgccagcggcattcaaacgtattacttgggctgaacacggtccagaatcatccgaaccatgcgctgcagctccgggtcttcggactcggcgcgctccatgaaccagccgaacatgtcctggtcttcgcaagtcagcagcctgacgtagagatcgcgatccaccttgttaagcgtcgcgtacacctctttagtgaaaggcaccagcaacacatcaagctcaagcatgccgcgccggctgtgccagtagagacgattgatttctacatcttcgaccatggagcgctcctcaaataggcggcaagtatacagacccgacggcaccgcaacactcggctttggtcgccccacatggaaactatccatttaccgggcgcccctctatgatgcacccatcacttttttacctgcgatgaaccatggctgactctgctttcttctgccccctgtcacacgaaggcgttctcgccgtccgcggctccgacgccgtcaagttcctgcaagggcaactgacctgcaacctcaattacctgagcgagacccaggccagccttggcgcgcgctgcacgcaaaaagggcgcatgcagtcgagctttcgcattgtgttgcaaggtgatggcgtgcttctggccatggccaccgaactgctcgaaccgcagttggcggacctgaagaaatatgcagtattttccaaatccaaactcaccgacgaaagcgccggttgggcgcgcttcggtctggccgatgcggatcaagccctggccagcctcggccttgaactgccggctgaaaccgacagtgtcgtacgcaccgacacattgatcgccattcgcgtctcccccggccgcgccgaactctgggtgcctgccgatctggccgaaacgacacgtaaccaactggctgcgcagttgaaagaagccgacctgaacgcttggctgctgggccagatccgcgccggtatcggccaggtcatgccgcagacccgcgaactgttcatcccgcagatgctcaacctgcaagccgtcggtggcgtcagtttcaagaagggctgctacaccggccaggaaatcgtcgcccgcatgcaatacctcggcaagctcaagcgtcgcctgtatcgcctgcgcctcaatgccgctgaattgcccgagccaggcaacccgctgttctcacccagccataacagctcaatcggcgaagtcgtgatcgccgcaaaagctgaccagtcgattgaacttctggccgtgctgcaagccgaagctgccgacagtggcgacgtgcacttaggcaccctggaaggccccggcttgcaactgcttgacctgccctaccaactggaccgtgatcgagagatccagcgttaatcgccgtaccttttttgcagcaccctagagagcatgaatgaacaagctggcggaaaaagtccaacaggctttggtaacggccatcgataacgatgacctggttctgccgacattaccggaagtggccctgaacatacgtcaggccgccgaagatccggatatcagcatcagccacttgagcaaagtgatcggtcgcgataccgccctgtcggcgcgcctgatcaaagtggtcaacagccctttgttgcgcgccactcaggaagtcaccgacctgcacaccgcaatcacccgcttgggcaccaactacagcagcaacctggcaatcgggttggtgatggagcagatcttccacgcccgctccgaagccgttgaacagaaaatgcgcgatgtatggcgccgcagcctggaagtggctggcgtcagctacgccttgtgccgcagccacagccaactcaagccagaccaggcagcgctgggtggcctcgtgcatcagattggcgttctgccgatcctcacgtatgccgaagaccactacgagctgctgtccgacccggtcagcctcaaccatgtgatcgacagcattcacccgatactgggcgacaagttgttgggcggttgggattttccggaaatgctggcgaatctgccggggcaatacctgaacctggagcgcgattctccaagcctggactacattgacctggtgcaagtcgcggttctgtattgccaccgaggcaccagccacccgctggcgggcgtggcggtttccacgttgcccgccatcaaaaaactgcgtgtagacccttacagcgaagccctgcgtgccgagctggatgaagcccggtcgatgttttactgatcagccggcgataaaactcacacgcaccttcaaccccgccaactcaccatcgtgcaggctgatctgtgccagatgcgcgcggcagatttcgccgacaattgccagcccgagccccgaccccacaccctgctggctgcgtcgatagaaccgctcaaacacccggtcacgctcatccagggggatgcccgggccgtcatcttcgacttcaagaacagccggcgcggtgacccgcaagatcacattgccgccggggggcgtgtgggccagggcgttatccaccaagttgctcagcagttcattcagcaaagtaggctcgccacgcaaccacaccggctcatccgcttccaacgcgagggcgacgccacgcgcgtgggccagcggtgccatcgccatgccgagttcgcgggccagctggctgaggtcaagtaactgcgcgccgccttcggcaattgcccgggcgccgttttcaatacgcgccagggacagtaactgattggccagatgggtcaggcggtcggtgccctgcgcagcggtttccagagtgctgcgccaggtagccggatcttcggcgcgcaaaccaagctccaggcgcgccttgagcgcggccaacggcgtgcgcagctcgtgggaagcgtcggcaataaactgcgcctggcgctcgaactggccgcgcaaacgctcggtgaagtgattgagggaacgcaccagcgggccgaattcgtgctgcacctccaccagcggtaaaggccgcaggtcgtcaggctggcgctcttccaccgccgtgcgcaggcgctccagcggtcgcagtgccgcgctcacggcaaaccacaccagcaacaacgcgccgatggccagcatgccgaggcgcaacaaagtgtcggccatcaagctgcgcgccatgctttcgcgcgcttcgtcggtttccgccacgcgaatttccgccatgccattcatgttcggctcggaaaccgccttgagcaagctgaccacgcgtacttgctggccctgataggtggcgttgtagaaccgcgccaatgccgggtaatcatcggtgcgcggcgtgccgggcggagggccggggaggttttcgtagccggagatcagcttgcggtcgatgtcattgacctggtaataaatgcgcccggcgctgtcgtaggcaaaggtgtcgagggccacatacggcacgttggcgctcaaggtgccatccacctgcgtaaggcctgcggcgatggtccgcgccgaggccagcaacgtgcggtcataggccgtgtcagcagcttcgcgaccgttccagtaggcactcatgccgctggccagcatcagcaccaccagcaacagtgccaggttccacagcagtcgccaacgcaggctgctgggcttatgcatcgcgggcttccagcaggtagcccaagccacggaaggtcacgatggcaatgggctggccatcaagcttcttgcgcaagcggtgcacgtagatttcgatggcatcggggctggcttcttcatccagcccaaacacctgggaggctagctgctccttgctcatcactcggccaggacgagcgatcaaggcttccagcaccgcttgctcgcgggaggtcagcgtcatcagttcgccgcccacggtgaaacgtcgagtgtcgaggtcgtacaccagcacaccgcaggcttgctggcgctcgccccccagcacactgcggcgcaacagcgccttgacccgtgcttccagctccgtcagttcaaagggcttggccaggtagtcgtcagcgccaaggttcaggccgtgcacgcggtctttcacatcactgcgcgcggtcaacatcaacacaggcagatttttcccacgcgcccgcaaccgcgcgagcacctcgaaaccatccatgcgcggcagccccacatcgagcaccaccgccgcatattcctcgctgcccaacgccaggtcagcggccacgccgtcgtgcagcacgtcgacggtcaaacccatgctcttgagcgcctgggcgacactttcggccagttgcagatggtcttcaaccaggaggacacgcatggattttcacctcattcgggcatggtcggcgccacgctttgccgggcagtttacaggcgccgactgccctgtgaagcccgaaaacattgaaagacaactgaaaggttagtgaaagcttcgccctttagcatccagcgacggtgggtaatgcccgcccagctgcctgatccgcagcgcccgaaaaacgcctcgatgcgttttcgccaaaataagaacaataacggagtacgcaacgatgctgtcgacccagccccaggcccgcccgcctgctcgtttttcccgtctgtcccagaccgcccttgccagtgccgccgccctcgccggcttttcgccactcagccaggctgcctttttcgaagacagcagcggcaccctcgaaacccgcaacatgtacttcaaccgcgactttcgcgacggcaccagcgcgcaacaatccaagcgcgatgaatgggcccaggggttcatgctcaacctgcaatcgggctataccgacggcaccgtcggcttcggcgtggacgcgctgggcatgctcggcgtcaagctcgactccagccccgaccgcaccggcaccggcctgttgccgacgcacgacgatggccgcgccgccaacgaatactccaagctgggcgtgaccggcaaaatgaaaatctcctccaccgagttgaaaatcggtgcgctgatccccgaactgccgatcctcaaacccaacgacgggcgcatcctgccgcagaccttcaatggcggtctgctgacctccaaggaattcaagaacctggtactcaccggcggccgtctcgacaaggccaaggaccgcgacgacaccaattacgaagacatcgccctcaataacaaaaacggtcgtttcctcagcggtgccaccggcaagcacttcaacttcggtggcgcagactacaaattcgccgacaagatcaccggcagctaccacttcgcccaactcgacgacgtgtaccgccagcacttcctcggcctggtcgccgcccggccgatgggcccgggcaccttcggtgccgatgcacgcctttccatcagtgacgaaaccggctctgcccgtggcggcaagatcgacaacaaatccttcagcagcctgttcagctatggcctcaatggccataagctcagcgccggctaccagcgcatgttcggtgacagcgcgtttccgtatgtggatggcagcgacccgtacctcgtcaacttcgtgcagatcaatgactttgccggcgccgaagagcgttcctggcaggcgcgttacgactacgacttcgccaagctgggcattcccggtttgagtttcatgagccgttacctgtcgggtgacaacatcaagctcaagaacggcgagaccgccaaggagtgggaacgcaacagtgaagtccgctacgtggtgcaaagcggcacgttcaaggacgtggcctttcgcctgcgcaacgccacgtaccgcaccaactattcggcgcgtgatgcagatgaggttcgtgtactcgtcagctatagcgtcgcactgtggtaagtgcactcaggcaagcagcaactcataacaacaaagacggagataaccatgaccttttcactgcgtaaactggccctcgccgccggctgcatgatgttcgccggccaattgctggccgccgaagaacccaagcgcccggagtgcatcgcccccgcctcccccggcggtggttttgacctgacctgcaaactggcgcaaagcgcgctggtcaacgagaagttgctgagcaagccgatgcgcgtgacctacatgcctggcggcgtgggtgcggtggcctacaacgcggtggttgcccaacgccctgccgacgccggtacgttggtggcctggtccagtggctcgctgctgaacctggcccagggcaaattcggccgcttcgatgaaagcgcggtacgctggctggcggccgtcggcaccagctacggtgccatcgcggtgaaaagcgattcgccttacaaaaccctcgacgatctcgtcaaagccctgaagaaagatccgggcagcgtggtgatcggttccggcggcaccgtcggcagccaggactggatgcaaaccgccttgatcgccaaggccgccgggatcaacccgcgcgagctgcgttacgtggccctcgaaggcggcggcgaaatcgccactgcgctgctcggtggtcacatccaggtcggcagtaccgacatctccgactccatgccgcacatcctcagcggtgacatgcgcctgctggccgtgttcgccgaagagcgcctggacgagccggaaatgaaaaacatcccgaccgccaaggagcaaggctacgacatcgtctggccagtggtgcgcggcttctacctcgggccaaaagtcagcgatgccgactacgcctggtggaaagaagcgttcgacaaactgctggcctccgaagagttcgccaagctgcgtgaccagcgcgagctgttcccgttcgccatgaccggcccggagctggacacctacgtgaaaaaacaggtggctgactacaaagtgttggccaaagagttcggcctgatccagtaatcgcccctcttttgcgcggccgcgccctcttgaacagtgggcgcgacccaggagttccacatgctcttacaacgcattttcgcctcggtgatgctgctggtctgcgccggtctggcgctgatggcctggccgtatcaggcgtcgttttcctacgaacccgtcggcccccgcgcctacccgctgctgatgctcgggctgatgagcctgggcctgatctacatgctgtttcgcccacagccgaccaaacacaccgaagaagaacccgcgctggaccgcgaaaccctgatcaagatcggcatttgcgtggcgctgctgatcgtgttcgccggcaccttcgaacccctgggcttcatcctcagcagcatgctgatcggcattccaatggcgcgcctgtatggcggccgctggttaccgagcgtggtgatcgtcagcctgatggccattggtctttacctgctgttcgacaaagccatggatgtaccgctgcccctcggcctgctcgacgttctggagaactgacatggatactttcagctatttgggtcagggcttcggcgttgcactctccccttacaacctggtgaccgccctgtgcggcaccctgatcggcaccgtggttggcctgttgccgggcctgggcccgatcaacggcgtggcactgttgatccccatcgcgttcgccctgggcctgccgccggagtcggcgctgatcctgctggcagcggtgtacctgggttgcgaatacggcggccgtatcagctcgatcctgctcaacattccgggcgaagcgtccaccgtgatgaccaccctcgacggctacccaatggcccgcaaaggcctggccggtgtggccctgtcgctgtcggcgtggagttcgttcatcggcgcatttatcgccacctgcggcatggtgctgtttgcaccactgctggccaagtgggcgattgccttcggcccggcggaatatttcgtactgatggtgttcgcgattgtctgcctcggcggcatggccggcgacaaaccgttgaaaacttttgttgcggcattgatcggcctgttcctttcggctgtgggcatcgacgccaacagcggcgtctaccgctttaccggcgacaatatccacctcaccgacggcatccagtttgtggtgttggtgctgggcttgttctccatcagcgaaatcctcttgctgctggaaaaaacccaccgtggtcaggaagcggtaaaagccaccgggcggatgatgttcaacctcaaggaagcgggcgcggtctttgtggtaaacatccgttgcggcctgctcggcttcatcatgggcgtgttgcccggcgccggtgccacacttgcatcagccgttgcctacatgaccgagaaacgcctggccggtgccagcggcaagttcggccagggcgacatgcgcggcctcgctgctccagaaaccgccatcggcgcatccgcctgcggcgccctcgtgccgatgctgaccctcggcgtacccggttcaggcaccacggcggtgatgatcggcgcgctgtcgctgtacaacatcacccctggcccgctgctgttccaacagcaaccggacatcgtctggggcctgatcgcgtcgttgttcatcgccaacatcatgctggtgatcctcaacatcccgatgatccgcatcttcacccgcattctggccgtgccgaactgggcgctggtgccggtgattgccatcatcacggcgattggtgtttacgccgtgcacgccaccaccttcgacctgttcctgatggtcggtatcggcatcttcggctacatcctgcgcaagctcgacttcccgctttcgccggtgctgctgggctttatcctcggcggcttgatggagcagaacctgcgccgtgcgctgtcgatctccaacggtgacctgcagatcctctggtcgagcccgatcacctttggcgtgtgggtactgacggcgctgatgctggccttcccgctggtgcgcatctaccgcaaacgtgccctgcagcgtcgtgccgtggccgatgtctgacgtcacctttaaacaatggtggggaacaccgctggtcggcttggccggcggttacctggccagccttgtcggttggcctttgccgtatatggtcggttcgttactggcgattatcctggtgcgctgccttacgccgtggcaattggcggagattcccggtgggcgcaaatgcggccaatgggtggtgggtatcggcattggcctgcacttcactccggtggtgatcgagcaggtgatgagccacttcgggctgattttcttcggtgcgctgatcactagcttgtcgagcattgtgggcgtgtggttgatgcgccgcagcggtgaagaccgcgccactgcgtttttctccagcatgccgggcggctccggtgagatggtcaacctcggcgcacgcaatggcgcggtactcagccgtgtcgcggccgggcaaagtttgcgggtgttggtggtggtgctgtgtgtgccggcgatcttcaagtatttgcttgaaggcggcacaccgcagtttcatccggcgccagtgagctgggcgtggctggcgctgttgtttccactgggcgcgctggtggcctggggctggcagcgcttgcgtcagccaaacccgtggctgttcgggccgttgttggtgagcgcgacggcgagtgttgtctgggacttgcacatcggcctgcccgatggtggcagccagatcggccaatggttgatcggcagcggcttgggttgccacttcaatcgtcagttctttcgccgggcacccgctttcatggggcgcaccttgatcggcacggccttgaccatggcgctggcgacgctggcagcggtgggtttgagcgcgttgacgcaactggatttgcgttcactgacgttgggcatgatgcctggcggcattgccgagatgagcctcacggcggagaccctgcaactgtcggtgccgttggtgacggcgatgcaggtgatgcggttgttgtttgtgttgtttctcgccgagccgttgttcaggcactggaatcgccagcccgaaaagatttaacgctccgacaccgttcaaaatgtgggagctggcttgcctgcgatagcggtctatcagccactgaacctgtcaactgatacaccgccatcgcgggcaagcccgctcccacattggcttgcggtgaggcttagagcggcggcaaccgccactcgatcggcgtctcgccattctgctcgagaaacttgttggtgcggctgaaatgcccgcagcccagaaagccgcgatacgccgacaacggcgacgggtgcaccgacgtcagcaccaggtgcttggtcgcatccaccaacttctgcttgccctgtgcatgggcgccccacagcaaaaacaccaagtgtggctgatgctcgctgaccacttcgataatccggtccgtaaagtgctgccagcctttgcctgcatgggcgttggcattggcacgctccacggtcatggtggtgttgagcaacaaaacgccctgatcggcccagctttgcaggcagccatggctggggatgtcgatattcaggtcgcgcttgagttctttatagatattgaccagcgacggcggcgtcggcacgcccggctgcaccgagaagcacaagccgtgggcctggcccgggccgtggtaggggtcctggccgagaatcaccactttgaccttatccagcggcgtggaattaagggcgttgaaaatcagcgggcccggcgggtagatctctttgccggcggcatgttcctggcgcaggaattcgcgcaactcagccatgtagggcttatcgaactcatcgcgcagggcgtgcttccagctgggttcgagtttgatacggtcgccttcggtcatggtggggtcatcgtgtaaaaaagaatgggcgaaccctaggaaagccgaccccgcttgtcaattgatctgacacacaaccgccactttcctgcgaagcgatcatactgaaccttcactgtctcgattgaggtcacgatgaacctgcacttcgaagagctgaccggcagcgacggtgcccgcttgggcatcgccagcctggacgctgaaaagtccctcaacgcactgtccttgccaatgattctggccctgagcgaacgcctggacacctgggccaaagacccgaacattacgtgcgtgttgttgcggggtaacggccccaaggcgttttgcgccggtggcgaggtgcgcagcctggcccaggcctgtcgtgaacagcccggcgtcgtaccgccgctggccgcgcagttttttgctgcggaatatcgtctcgactatcgcctgcacacttaccccaagccgctgatctgctggggccacggttatgtgctggggggtggtatgggcctgttgcaaagcgcggcagtacgcatcgtcacgccgagcagccgcctggcgatgcccgaaatcagtatcggcttgtacccggatgtgggcgccagctggtttctgtcacgcctgcctggcaagctcggtgtgttcctgggcctcaccggtgctcacatcaacgggcgtgacgccctggacctgggcctggctgaccgtttcctgcgtgacgaccagcaggacgaactgatcgaaggcctgctgcagctgaattggcaggaacagaccgccatgcaactcaacagcctgctgaaggcactggcgcaggaagccgtcagccaacagcccgaaccgcaatggctaccgcgtcgggcacagatcgacgagtggctggatgtgggagatgtgcgctgcgcctggcgcgccttgagcctgttgcgcgaccacgccgacccgctgttcagccgcgctggcaagaccctcagtgaaggctgcccgctgactgcgcacctggtgtgggaacagatccagcgggcgcggcatctttcattggccgaagtgtttcagatggagtactccttgagcctcaactgctgtcgccacccggaattcagtgaaggggtgcgcgcgcgattgatcgacaaggaccagacgccccgctggcattggccggacatcaacactgtgcctgaagcggtggtgcaggcgcacttcagcaaggcgtgggaaggcaggaatcctctggcagacctgtccgactattgacagatcaccaactctttcgctcaacgatgaacgagcaattgatcgccaggttttccttgcatacgtaaacgttttctcccaacgggccgatcgtggactcccaaaacagggagtccttcaacgatatggtgtttagcttctccgttgcgccgtaacgcaaggccacggtctgcccgttgcccatgagataaacgcatctttcaaggaagccattttcccgttccttgcccttgcctggcgtgaagagagcgccgataaaccgatccgcaaaatcacgcgtctcgaccttcgggctttgccaaagaatctgcccatcattggcctggaaatgaccgtctacataatggatggatgaaggaaaggggcaactgtcatcggcatttgcttgcgtgatgcctgccgctaacagaataaaaaagcacgtcaattttgtgatcataacgagttcgttccattaacccactgactcaccagatacgcgcaacggcgccaatccattggggcccagctcaagcacttatgatagctgtcaaatatgacagtgccgacaaacggtacaaaaaaaagcggcgctgtaagcgccgctttaaatcaacaagcgtcaacgatgaccgccgccgcgccctcctccatgatcggagccgcgacctggcccaccattaccccagtgcccgcccccccagccttggttcgggtacggtcggtaagcgggccgtgggtagtaacgcggcgctggctgataatagcgcggcgatgagtagtaacgcggtggaggcgcgtagtagcgcggtggcgcagaatagctacgcccatactgatagtaagtggggccgccgtagtagtaggcgggcgccggagcggtgtagacctcggagcgatagtacgtagcgcctccatcgtagtagggcacgcaagcgctcagtgtcaggccgagtaaaacggtgagtagcagtcgtcgatacatggcggcctcctggaccgcgaaagagcaccaccagcgacgctggggagcggcattcggatttcaccgaatgacgaaatatctgacatcacaaaccgaatccggtgcgttttcgacacaggttgaaacatgtgtttcagacgagctgaacgcctctttgcagtgcacccccgcaccagcgcaaagcacacctaccgatcaggccaccgtcctcaccgcgcaaacccacgagctacgcaccttcgtcccacttggcacgactctcgctttgccaaccctgtgcaggattcatcacaggttcgcggcaccacaatttgcaatggccgactagggttccggctcgcttgacgcgagtggctggtccgagagttggcgacctccagttgaggttacacggcgggataaaagcccgggagacaagccaccgttcacggtgccgcgttgctccctgctcgcccacgatcaactggagaagccccatgccatcaccccgtttacccgccctgctcgccgccgccttcgctgccgtgttgagctttcaaacccaagccgccgtcaaagaccacttcagcgtgtgctggacgatttacgccggctggatgccctgggagtacgccggcagccaaggcatcctcgacaagtgggccaagaagtacggcatcaagatcgacatggtgcagctcaacgactacgtcgaatccatcaaccaatacaccgccggccagttcgacggctgcaccatgaccaacatggacgccttgaccatccccgcagccggaggcgtggacagcaccgcgctggtggtcagcgacttctccaacggcaacgacggcgtggtcatcaagggcaccggcaagaccgtggccgacctcaagggcatgaacatcaacctagtggaactctccgtatcccactacctgctggcccgcgcattggagtcggccgacctcactgaaaaagacctgaaggtcgtcaacacctccgacgccgacatcgccgcggccttcaataccgaccaagtgcaggccgtgaccacctggaacccgatgctgtccgagatcaaagccaagccgggcgtaacgcaggtgttcgactccagcaaaatacccggcgaaatcatggacatgatggtggtcaacacccaaaccctcaaagacaacccggccctgggcaaagccctcaccggtgcgtggtttgaagtggtcgcgctgatgaacgccaacaacgctgccagcaccgcagccctggaacatatggccaaggcgtcgggcaccgacctcaaggggttccaggcacaactggacaccaccaagctgtttgccacccccaaggaagccctggccttcgccaccagcgcgcaattgcccgccaccctgcgcaaggtcgccgagttctcgtttgaacatggcctgctcggtgaaggggccaaggacagcagcgctgtgggcatgagtttcgccaatggcgtgaccagtggcgacacagccaacctcaagctgcatttcgaccccagctatgtacagatggccgtcgacggcacgttgtaagaggacccggccatgcgcctgatcaaccgtcgcccggaacgctccagccgcctgctgctggtgctgctgccattcgctttgctgctgttcgcctacttcgtgggctcggccgagcgtctggcacaaaaccccaacgacaagctgctgccaagcgccgcgcaaatgggcgacgcggtaaaacgcctggcgttcagcgccgatgcgcgcaccggtgaatacgtactgtggcaagacagcgcatcgagcctgcgccgcctggcgatcggcctgggaatcagcgccctcgccggcctgtgcctgggcatcgcagccggcaccttgccgctgtttggtgcgccgctgtcgccgctgctcaccgtactgtcgatggtgccgccgctggcaatcctgccgattctgttcatcgtgtttggcttgggggaattgtccaaggtgatgctgatcgtcatcggcatcaccccggcactggcgcgtgacctggaacagcgggcgcgggagattcccgtcgagttgctggtgaaagctcaaaccctcggcgcctccacctggaccttgatgctgcgtgtggtgttgccgcaattgttgccgcgcctgctgatctcgctgcgcttgatgttgggcgcggcgtggctgttcctgatcgccgccgaggccatcgcctccaccgacggcttgggctaccggatcttcctggtacgccgctacctcgcgatggacgtgatcctgccctacgtggtgtggatcaccctgctcgcctggctgatggattggggcctcaaaaccctgacccggcgcgcgttcccctggtacgaaggagcgcgggcatgagctttatcagcgtcaacaatgtgtggcagcgctatggcgaccaggtggtgctcgaaggcctcaacctgcaggttgccgagggtgagttctgcaccctggtcggcacctcgggctgcggcaagtccaccttcctgcgcctgctgctgggtcaggaaaccgcaagcaaaggtcagatcctgttgagcggccagccgctggccgccgagccggatgccagccgtggcgtggtgttccagcgctactcggtgttcccgcatttgaccgtgctggataacgtcgccctgggccttgaattgccccgctcacgtttgcttgggcggttgttcggcaaggccaaacaagatgcccgggaacaggccgccacactgctgaacaaagtcggcctcggccaggcgctgggcaaatacccggcgcaactttcaggcggcatgcaacaacgcctggccatcgcccaggcactgatcatgaaaccccgcgtgttgctgctggacgaacctttcggcgccctcgaccccggcattcgcaaagacatgcaccacttgctgttggagctgtggcgcgaaacccggttgacggtgttcatggtcacccacgacctcagcgaaggcttcagcctcggcacacgcctgttggtcttcgacaaggttcgcgtcgatccccacgcccccggcgcctatggcgcccgcatcacctacgacatccctttgaacagcgagcgccgcaaagcgctcgccaccgaacttggagccacttgcaaatgaccgattcgcctcaactgttcccgcccttcgccgaggaaatgctgcccggcggcggccaccgttctttcgtgctcaagcgcggccaactgctgcggctcaccgacattcgcggcggcgccaacgtcagcctgaccctgctgaacgccaatgaaaagaccgagcgcctgaacctgcccgacagcctcaaatgccagcacaccgccaaactcaccacgggccattgcttgtattcagacatgggccgcgtgctcgcggcgatcaccgccgacacctgcggctggagtgacagcatcggcggcgtgttgtgtgcctctgaagtggccgagaagtacggccaggggcgctatcaggaactgcgcaacggcttttttcgcaacggcaccgacaatttgctggtggagctgggcaaatggggcctgggcctgtccgacctgctgatgaccctcaacctgttcagccgcgtcagcgtggatggcgacggtggcttgcacttcgtgcccggcaactcccgggccggtgactacatcgaactctacgcaccgatggacacgctggtggtgcttaccgccctgcaacacccgatggaccccaaccccgactacgcgccgcagccgctgaaactgagctggatgaacgccgataaaagcgtcgctgaacactgccgcacctcgcgcccggaaaacgagcgcggctttatcaacaccgaccgcctgttcgcctgaggagctgccatgtctattgcactgaaacaacctgacactgcggtgtaccgcgcaaccattcctgccggcgagccatggctgatggaggtcaaggccggccagaccttgcgcatcctcgaccttgagggcaaccaggctgtggatacgctgttctacagcctgaaaaacccgcgcgagcgctatgacgtgcaacgcaccttgcgccggcaaaaaagcgtctacctgagcaccggcagcgtgctgtattccaacctcggccagccgatgctgaccatcgtcgacgacacctgcgggcgccacgacaccctcggcggcgcgtgtgcccaagaaagcaacaccgtgcgttacgccctggaaaaacgctacatgcacagctgccgcgacaactacctgcgcgcctgtgcccacgacggccgactgggcaaaagcgacatcgggccgaacatcaatttcttcatgaacgtaccggtcacggcagacggcgggctgacgtttgaggacggcatttccgcaccgggcaagtacgtcgacctgcgcgcgcagatggacgtcatcgtgctgatttccaactgcccgcaactgaacaacccctgcaacgcctacaacccgacacctgcggagttactggtatggaactgaagttcaagcgcatacgcctttggctgttcacgctgtgccaatccagagccgggcaatgccttaacaaacaatgaagttcaactgtgggagctggcttgcctgcgatagcggtgcatcaacctgcagatgggttagctgacacaccgcgatcgcgggcaagcccggctcccacagttgatctccactgctttcggaatttgcgctgcggacgaccgtagcgcctaccccactttgcgggacggcccgcagggttttgccatgttcgaaaaactcttgatcgccaaccgtggcgccatcgcctgccgcatcctgcgcaccttgcatgagctgcacgtcaaaggcgtcgccgtgtacgccgaggccgatgccgccagcctgcatatccgccaagccgacgaggcctacagcctcggtgaaggcgcagcggccagtacctatctggcagtggaaaaaatcctcgccacagccaaagcctgtggcgccaaagcgattcatcccggctatggttttctatcggaaaatgccgcctttgccgaggcctgtgaaaacgccgggattgccttcgtcgggccaaccccgcaacagcttcgcgtattcggcctcaagcacaccgcgcgagccttggccaaacagcatcggataccgctgctggaaggcaccgagctgctcgacagccttgatgcggcgttgtcggctgccgaccacgtgggctatccggtcatgctgaaaagcacagccggcggcggcggtatcggcatgcgtgtgtgccgcagtgccgtggagttgagtgacgcctttgaggccgtcaaacgcttgggtcagaacaacttcagtgacgccggcgtgtttatcgagaaatacatccagcacgctcggcaccttgaagtgcaggtatttggcgacggcgccggtgaagtcatcgccctgggcgtgcgcgactgttccgtgcagcggcgcaaccagaaagtcctcgaagaaaccccggcaccgaacctgcctgacggcatggcagacgcgttgtgctcggcggcgatcacgctggccaaagccgtgaattatcgcagcgccggcaccgttgaatttatctacgacagtgccgatgggcgcttctacttcctggaagtgaacacccgtttgcaggtggaacacggcgtcaccgagcaagtgtggggcgtggacctggtgcgctggatggtgcaactggccgcgggtgaattgccgccgttgagcaggcttgcgttgaaaccccaggggcatgcgattcaggcacggctgtacgcggaagacccgggcaaggattttcagccaagccccggcctgctgacccgcgtggacttcccggttgctcaaggcctgcgaatcgacacctgggtcgaagccggctgcgaaatcccgccctacttcgacccgatgatcgccaagctcatcacctgggcacccacccgcgagcaggcgcgactgggcttgcaccgggccctgagcgacagccacctctacggcgtggaaaccaaccgcgattacctgcgccagatcctgctcgctgcaccgttcgccagtggccgaccctggacacgctgcctggaagatctggcctacaccgccaacaccttcgaggtgctcagcgcgggcacgcaaaccagtgtgcaggattaccctggccgcctcggttattgggccgtcggcgtgccgccctcggggccgatggacagccgcgcgctgcgcctgggcaatcgcctgctgggcaacagcgaaggcgcggccgcactggaaatcaccatgaccgggccattgttgcgcttcaattgcgcagcggtggtggcggtgaccggggccgacattgcgctgcagctcaatgacgaacccgtaccgatgaataccgcgctgctgatcgagccgggctcgaccttgagcgttggcactgtcgtcgcagccggcgcgcgcagctacctgtgtgtacgcggtgggctgcaagtgccggactacctgggcagtaaaagcaccttcaccctcggccagttcggcgggcatggcgggcgggccctgcgcgccggggatgtgttgcatctgttgccattggtggacgccaacgccggtcagcaattgaccccggaaccgctggtacaggtgcgcacattacgcgtgatctacggcccgcacggcgcaccggagtacttcaaacccgagtacatcgacactttctttgccacgcactgggaggtgcatttcaactccagccgcaccggcgttcgattgatcgggcccaaacccttgtgggcgcgtacggatggcggcgaggcgggcctgcatccatcgaatatccatgacaacccctacgccattggcgccgtggatttcaccggggacatgccggtgatccttgggccagacggaccaagcctgggcgggttcgtgtgcccggtgacggtgatcgaggcagacctttggcagctcgggcaactcaaagcgggcgacaaaatccgttttgaacctgttgacctcaccaccgcccgatcccttgccctgaaatgggaccagtgtgggagctggcttgcctgcgatacgggcaactcggtccttcagacagaccacagtgatgccatcgcgggcaagcccggctcccatattgatctccattcacttcagatcgagtcgccagtggtattggatgtaggtcaaaacgacactcgcttggtcgcccgcctcgcaggcgacacccacctattgctggaaatcggcgccgccgaactcgacctggtcttgcgctttcgcggccatgccctgatgcaagcgctcgaggcccgcgccctgcacggcgtgatcgacctgaccccgggcatccgctcgctgcaaatccactatcagcccgaagcactgccgctggctgatctgttgccgctgatcacccgtgaatggtccgccgtgtgcgccacgcaaaacctgcaagtgccctcgcgcatcgtgcacctgccgctgtcctgggacgacccggcctgccagctcgccatcgagaaatacatgaccaccgtgcgcaaggacgcgccctggtgcccgagcaatcttgagttcatccgccgcatcaatgacctggcaaacctcgacgaagtgcgccaaacggtgttcgacgccagctacctggtgatgggcctgggcgacgtttacctcggcgcgccggtggctacgccgctggacccgcgccatcgtctggtgaccaccaaatacaacccggcccgcacctggaccgccgaaaactcggtgggcatcggcggcgcctatttgtgcgtgtacggcatggaaggccccggtggctaccagtttgtagggcgcactttgcagatgtggaaccgctatcgggaagtggcggcgtttgcgggcaagccatggctgttgcggttttttgaccagatccggttctatccggtgagcagcgatgagctggtgcggatccggcgcgactttccccttgggcgctttgaattgagcatcgaggaaagctcgttgaacctggcgcaataccaagcgtttctgacgcgcgaagcctccagtatcggtgcgtttcgtgaacatcagcagcacgcgttcaatgccgagcgcgaacgctggatcgccagcggccaggcgcattttgacagcgaggaacaagcgcctcccctgagtgatgacacgccattgcgtgcccatgaatgcagcatcgacagcccgatcgccggcaacctctggcaggtgcagattgcgctgggcgagcaggtcaaacccggtgatgtgctggtggtcctggagtccatgaagatggaaattcccgtgctcgcgcccttcgccggcaccgtgcgcgagatccccgtgcaacccggcagcagcattggcgccgggcaacgcgtcgtggtgctggaacgtgactgacttttctttttcgacaggcggacaagccatgaatctgcaactggacaccctgcgcaagacctacctcggcggcgacaccacgccacgcgccgtgctgctgcaactgcgtgaaaaagccgcgcagttgaaccctgactatcatctgtttattcacctgctcagcgtggcggagctggagccgtacctgctggcactcgaaggtcgtgatccctcgcaattgcccctgtacggcatcccttttgcgatcaaggacaacatcgatctggccggcattcccaccacggcagcctgcccggcgtttgcctatgtgccgcagcacagtgcaacgattgtcgagcagttgatcaccctcggcgcggtgccgctgggcaagaccaacctggatcaatttgccaccgggctcaacggtagtcgctcgccctacggcgcctgccccaacagcgtgttgcctgattatccggcgggcggttccagtgcagggtcatcgttggcggtcgcgctgggcgtcgcgagttttgcgttgggcaccgacaccgccggttccgggcgtgtgccggcggcgttgaataacctggtggggctcaaggcgagcaaggggttgatctccacggcgggcgtggtgccggcttgccgcacgctggattgtgtcaccacatttacccacacggcacgggaggccagccagttgctggcgctgaccgccaggctggacccgcgggacgcctacagccgccagaacccggcatggaatgacgcttcggcgtttggcgcgccgaggccgtttcgctttggcgtaccgcgtcaagaggatctggaattcttcggctgcgaacaaggcccaccgctgtttcagcaggccatcgcgcgcatgatcgccctgggcggcgaaccggtcgcgctggacctgtcgcccttccttgaagccgcacgtctgctctatgaaggaccgtgggtggctgagcgctacagtgtcgcgggtgagttgatggagcgcgaccccgaagccgtgctgccggtgattcgcgcagtgttggccaaagccccggcggtcacgggcgtcgacaccttccgcgcgcactaccgtttgcaaaccttgaaagcacagtgtgaccgcttgctggaaggcctcgattgcgtactgacaccgaccatcggccgcccggtgaccctggcagaattgcaggccgaaccggtgctgcgcaatgccgaactgggctactacaccaacttcatgaacctgctggactatgccgccgtcgcagtacccagcgcgatgatgagcaacggtttgccctggggcgtgacgctgttcggccgcgcatttaccgaccagtacctgctcggcgtggcggacgccttacagcgccagcaggaggcgtcactcagcgttcccgcaggcatcgccagccatgactgcacgcggttggtggtgtgcggcgcgcacctgcaagggctggcgctcaatggccagttgctgcgccgtggggcgcgcttgctggaatgcacccacagctcggcggattatcaactgttcgccttggcaggcggcccgccgtatcggccgggcatgctgcgggtcagcgaaggtggcgtggcgatcgaagtggaagtgtgggaattgccaagccgcgagttgggttctttcctcaccggcatccctgcgcccctggggctgggcaaggtgcaactggcggacgggcgttgggaaaccggttttatctgcgaaccctatggcctgagcggcgccgtggatatcagccacttcggcggctggcgtggctacctgcgaagcttgcaatagcggggcggcgctgtatcgtgcagggaactccgcggccctgcccgatgcctgcctgaaccgaacgatgaccacgccaaccctttgccccgcctgcggtgcccgcaacgactgcgccctggccgacccgcgcaccgccgcccaggcctgctggtgcttcagcgtcaccctcgaccctgcagtgctccaagccctgccggacgagctgcgcaacaaagcctgcctgtgcccgcgttgcgcccaggtggatgcgcaattgcgcgaggctgaacagccgtaatgcgcgtagatcgtttcctcagcaacctgccgcgtttcaatcgccagcaggtgcgcctgttgcttgtcgaacggcggatcaccgttgatggcctggccgtcagtaatccgcaccatgaagtccgcgaattcagccgcgtgtgtgtcgacgaggaggtgctgcaagccggcaaacccgcgcgttacttcatgctgcacaaacctcaaggctgtgtgagcgccaccgctgacccggtgcatgccaccgtgctcgatttgcttgcggaaccggacaagggcgaacttcatatcgccggccgcctggacttcaacaccaccgggttgatgctgatcaccaacgatggccaatggtcgcggcgcctgacgcagccgcagaccaaattgcccaaggtctaccttgtggacaccgagcaggacattaccccggactatgcggtgaccttcaaggctggcctgtatttcgcctttgaagacctcaccacccaacctgccgagctggaactgctgggccccaggaccgcgcgtttaagcatcattgagggccgctatcaccaggtgaagcgcatgttcgggcatttcgataacaaggtgatcggcctgcatcgcgaacgaatggggcctctggtgctggatgccacgctggcgccaggcgagtaccgggcgttgactgacgacgaaatacgacaggtctgacgaccgttcggccggtgatggcaaaaaacctgcccggcgccttgcggggtagcgcatcggctgcttgaatccatcttgccagccagattatgactggcgagtcgcctataacctccaagaaacaccttgccccgcccgcgcttgatctacgggcctctcaggcaaacagcccgccataacaacccccgtcggccagccgctgtcggaccggcatgggcgcccattttccaggcgtatgcctacctgtcacaaagctcgtgcagagtgatctgcgcgcactacccgcttgccaggagtcttacgacatgaggccagaaatcgctgtgctggatatacagggtcagtatcgggtttacacggagttctatcgcgcggatgcagctgaaaagaccatcatcctggtcaatggctcgatggccaccacggcatccttcgcccaaaccgtgaaaagcctgtacccgcaattcaacgtggttttatacgaccagccctacgctggccgctccaaaatccacaaccgtcatgagcagatgctgacaaaggaagtcgaaggccagattcttctggaactgatcgaccactttgccgccgaacacgtgctgtcattttcctggggcggtgccgccaccctggtcgccctcgcccaccggccacgccgtgtggaaaaggcggtgatcagctcgttctcgccggtgatcaacgcgcccatgcgtgactacctcgaacgcggcgtcgactacctcggcaaccttgatcgccacagcgtcggccacctggtcaacagcaccatcggcaagcacctgccgtcgctgttcaagcgcttcaactacaagcatgtgagcagcctggccgaacacgaatacgggcagatgcactttcacatcagccatgtgctccacggcgatcggctgtgctacctcgcggcagcgaagcaaatcgatatcccggtgttgttcttgaatggcgagtgggacgaatacaccagcgcaggcgatgccaagctgtttggccagcacatcgccaaaagcagcttcagcaccatccaggcgaccgggcactttctggacatggagcacaaggccgcctgccgggacagccgggacgctgtggtgggctttctgaaaccgcagcgccaggtcagccggttgaggtatcagcacggccagacgcagcatgcctttgccatttgaaatcaaggtttggaaacccagccgcttctgtgggagccgggcttggccgcgatacaggcgcttcggtgtgtcagccacacaccgctgaagccatcgcaggcaagccagctcccacacaagctggcgccaggcttgatgagcgtaactcacacatttttgaagaaaaacttcaaatcccggcgaacatctggtacaaagtcagccgctctgagcgggtatagtttaatggtagaacagtagcttcccaagcttccgacgagggttcgattccctctacccgctccactcagattctgctttcacgtcaagtttgcttttgacgcgaaggcacaaaaaaccggcccttggtggccggtttttttatggacggaatttgatgtattggctattcgcttcgcaaacgctggcttcgtcgctttaaaatgctctttttggctccccttccccttggtatgtgcggcctgcctgttgcagtgcgcgggcgaagttacgcggcgcggtccacgcggtcttgcaccccttctaccagcatcatcgccggtttctgtctgacagaagtcattctgtcctaacagttacctatgccccaaggctgccaatacgtgatcagggtcattgtacaaggcacgcaataatgcccttgcgggcccctccggctcacgtctgccttgttcccaattctgaagcgttcccacaggcacatcgattgcctttgcaaagcgcgtctgcgacaaccccgtagcctgtcgaatctcttttactttcagagcatcaacataaaactcacgggaaggagggcactcaccccgtacgatctcgtccatctgggtcatgctttcgaccagacgattgaacagctttttctccatcacgcccaccctctgtttatttcgctcaaaactcttttttccgccgcagataaatcgtccttgattcccttgcgatagatcaggatcaatctaatgtggtgggccgtgcagaagtggtagtagatcactcttacacccccactctttcccttaccttgtaaggcccaacggatttttcttaggccattggtgccttgaattacatcacctgacgttgggttttcggccagaaatgcctggaactcaccgtaactttcctcgctcagaagcgcggccaaatcttctgtaaacgcgagcgattcgataaaaatcatacacacgcctatacgtcattggcgcatagatagcttattctggtcgcatccaatcatgcaaccgccgctcatcactctttgatcgggtttcgaagcttgcgccaaggtttgtgaagcgcaaactctacaagcttgaaccttgtgctatgacgtaggacgaaactgagttttccatcagaaaagagatagttaacgcaccgtctcaacgcctctttgcaccacccacgccaacggcaacgtcaacagcaacatccccgccaacaccatcaacgcgaccggaacgcccagcgcatcgcccaccccgccaaacaccacgggcgccagcgctccaccgccaatcgtgccggtgtaaaacacggcaaaggcctgctcgcgtttccccgccacagccagatccggcacagcaccatacaacaccgacgacgtgccattcagcgccagccccagcaccggcaacatcaccatcaaccccgtcagcggcaggtacaccgctgcaatgatcaacagcgccgtggacgtttcggtcaaccacaccgtcttcatcatgccgatgcgcacaccgaggtagccgcagagcaatttgccgaatgcgccgccgatgaacagcatcgtcaacgccaagccaatgccagcagtgcccgcgcctttggcttgcagcaggaacggcagaaaagtcagaaaccccatgcgcacggcgctgtcgagggtgccggtgaggatcagggcgcgcaggccggtcgcagagccgtttccgctgaggggtttggcgcttttcgtggaggacgattcggatgattgtgtaggcaccagccaccacaacagccccgccgctgcaagcccgagcaacccaagcaacgtggcgctggcacgccagctgatcacggtgagcaacagaccgatcaggcccgggatcagggttttgccgatgtccccggagaagttgtactgcgacaacgcttgtttgacccctccgccgtcctcataagcatccgtaatcatcgatgacgccagcggatgttgagtgctggcgcccaggccgcccaacaccaacgccatcaacaacaggccccatcccgtcgcttgccccaccaacaagtaagcaacgcccgccagtgcggtgccgcccaccagcatcggcacgcgaccccaccgtttggcggcacggctggccatgagctggaacaccgccatcatcccagagtaagcgccgcgtaaaaggccgatctgggcgtaggacaatgcgaactgcgcctgccagatcggtagcaacacgtagatcacatcggtgagcccatcgtgcacggcatgggcgctgcagcccgcaatcagggcacgacggcgagaagagggttcaggggcaggcacggcgacggtgtcggtcatggggttggaatcagctcaggtttaaggggcttccagcccgtcagggcgatcagcagcgtcagcagttgaaaaccgataatcagcgccacgcagcctgcccagccccaacgcgtccagatcaacgccgggagaatggcgccgcaactgccgcccaggtaatagcacgtgaggtaaacacctacggcagctgctttgttgtcgcgggcgttggcggcggtgaaggcgtttgcagcggcttgagcgagaaatacaccggtggagctgagcgccaggcctgccacgatgcaccacagggacggcagcaaggtcagcgccgagccggtcacccccagcacggcggcgagggtcagcagttcggcatggggcctggctttgctgaggcgacctgctaccggaatcaccaccagtgccagcaaaaacaccatgtaaagcgcgcccaaagctgcagggccgaggctgaacggaggtgagcccaagtacaaaccagcgtaggtaaacgctgcgacctgggagaacagcacacaaaatcctacggcgtatgcagcgagcaagggtttgcgaaaaatacccgtcgaagccgttctaacggctggcgtttgccgagggttggccggcaacaaaaactgaataaacccaccgaccatcaggctcaatgccgcgagcaactcaaacgcttcacgccagcccacatactcggtcatcacccccgtgacaaagcgcccggcgaacccgccgagtaccgtccccgccacatacaggctggtgacctcggtcactgtcccgccacgccaacggtcgccgatgtacgccacgctggtggcaaacaccaccgggatcagcatgccttcgacaaatcgccacaccaacacttcggcaaaactgtcggcataggcggtcatcaatgcaggcaccgccagcagcagcgcggccaccgcgattaccgtgcgttgctcaaaacgcccggtgagccggctgacaaagggtgccgtcatcgccactgccagcgtcgtgaccgtgatgctccagcccgccgcattggcgctgatatgaaattgcgcggcaaaggtcggcaggatgctctgggtggcatagaggttgagaaacgccgcgcagccacacaggaacagggcaagacgggcacaatgcaggcgcggtttcatgaaacctctcgttttattttgtgaggtctttatagaatggcgggcgggtcttaaaccaataccgatttcggaccgatcgataccccagggaccagaatgctcgacctacgcaagttgcgatactttctgacggtcgccgaagaattgcactttggccgcgcggctattcgcctgcacctggcgcagccgccgctgacacgacagatttcggcgctggaaacagagttgggcttcaagctgtttgatcgcaccagccgcacggtgagccttaccgctcagggccgttcgttcctgccctatgcacgcagtgtgctggagcaggtagaactggcgcaggtaatcgccggcaagctggccgcaggcactgccgggcaactggcgctggggtatgtcagctcgattgccctgtcggatttgttcagccaggccatccaggcgtttgcccagcgcttccccgaagtgcaactgaccctggtggaatgcgcgtccggcagcctcggcgcgcaggtggcggatggacgcctggatatcggtttgagtcgcttgttgccgcacaacgacgaggtgcgggcattgtcgctaggagaggagcgcctggtggccgcgatatccagtgacagccctctggtgagccagccgaacgtcagcctggcgcagctcagtgcctacccgctgatcctgtttccatcggactacggatcgggcctgaatcagtccatcgaacagctttaccggcaccacggccagccgctgcgtccgggaccaaccggccggcaaatcacctcgattatcgcgctggttgccgccgggcaaggcgtcgcgctggtgccggaatgcacccagagcctgatgaacaagggcgtgacctatcggcctttggcagaggcagatgcgtgcgcacagttattggtcctgaccccgaatgaaacaaaaagtgtgctggtcgatgcctttctcgccgtcattaccgaggccttacacacccggtaacagcaccgcaaaaccccgcaatacctctgcccgacgccatttccgcgcactcatacacttcaatcactcgccagcgaaataccgaccatcgaccgtcggtaggtagagtgttgataatttattttcagtggttatagtcaccaccaacacacaccacaaggaggtgctgtggatagcagatatttgataggacacatcgttgcagacggctggtacctggtgcgttctcgcggcagccatcatcatttcaagcacccgaccaaaccggggctggtgacgattccccatccgaaaaaggacctgttggacaagaccgccaagagcattttgaaacaggctctgttgagttaatcgtccctggaggacaacagacatgctttaccccatcgcaatttcaaccggcgacgaagatcacgcctggggcgtggaagtccccgatattcctggctgctactcggctggcgatgacctggacgacgccatggccatggcgcgcgaagccatcgaagggcacttcgaaatcctcgcggaagatggcgcgccaattccaggcgcgcaaaaagtcaccctgcatgcggccaaccctcagtacgcaggctgcacctgggcagtggtcgacattgatgtcaccaaatacctgggcaaagcgcagaagctcaacatcaccctgcccggctatctgctgaaccgtattgatgagtatgtgttgagccacccggaagaaaaaagccgttcgggttttctggcttcggcggcgctcaaggtcctgcagcaagaccgctgaccgaattccaccgcaagaaacgtagttttcaatcgggggcgctgttctagagttgaacaacattggaacaacgccccccatcaggagcccgctcatggcctacgaatacaaactcatgccctcccccgtcggccagctcaccctggtggcacgcgacggcaagctctgcgcgatcctgtgggaacaagagcgggccaaccgcgtgcgtcttggccagttgtacgaagccaacgacagcgcggtgctgcttgaaaccgagcgccaactgaaagagtacttcgccggcacgcgcaaccacttcgaggtggaactggacttcgcgggcaccgacttccagaaacaggtctggcaggcgctgctgaccatttctttcggcgaaacccgcagttacagccagatcgcgcatcagatcggtaacccgaaagccgtgcgtgctgtcggagccgccaatgggcgcaaccccatctcgatcattgcgccatgccatcgcgtgattggtgcatccgggggcctgaccgggtttgccggggggttggaagccaagcagtatttgctcgccctggaaggtccggaccagacagagctggctttttagaaggggccgccgacaaaacgcacagcgtcgctcatcgggcaaattgtaaaaagaaatttcagaacaaccctgcggtccatactttcatcaccctccctttcaaggaaaacggtcatgaaattttccgcagtctcgcaatccctgtcccgctgggcaggcagcccccgcactttctacgccgcggtggcgttgattctggtgtggagcctgagcgggccgtatttccactacaacgacacctggcaactgatcatcaacacctcgaccaccatcattaccttcctgatggtgttcctgatccagaacacgcaaaaccgcgacaacgacatcctgcacatcaagatcgacgaactgctgcgcgtctccaaggacgcgcaaaatgcagtcctgagcctcgatggcctggaccgcaaggaactggaaaaactgcgccaggaataccgtagcatcggcagcaccggaaccgtaagcctgaacagcagttgtggcgcgtcggtcgacgatgcggcgcaagccaagaccgatttgaaccaggcataaaaaaacggcggctggatacattccaaccgccgtttttgcttaaccaaatgcaatcaaccgtcgccttgatgacctttgccgtagcttgatgccaaggcacgagctttctgcaaacgctcttccagcttaggtaacgtctcgtccaccagcgcctttatttccggcacatccgacgcggcgccttcctgtttgaacaaggcaatggcgtcttcattttccttgacctgttgcgcggtgtaggcggcgtcaaaagaatcgccgtccttgagttcaggcatcagggtttcagccttgtcgacgatcttttcgcgcggcgccaccggcaggtcgagcttcttggcgatggccgccaagtgctgattggccaaggtacgttcgttgatcacctcgatggtgtagtccttgatttcctgggacgaggtcttggcgtgggccatgcggctggtttcgatgtcggccatccctttggccgaagcctgctcgatgaattcagccggcgactgggcgaaagcattgctggcgccgaggcccagcagcatcgcgaaactggcggtgcgtaaccggatagccatacggctcatgatgggttcctccagggcaaaaataagatcggaggaatttacccccgccctgaattcgaattttcagggcggcaaaggtttagaaaaaactcgccagtgcgacgaacggtcatcgccaggtcaagccggtttgctgccaaacaggcccggtagagcgtgtgccagagcgttgatggcaaagccgataaacatcacgccgcaaagtttggtgatcaggatttcatggcgctgatacatcgtgcgcacgcgctgggcgccgaccacgccaatcagaatcgcgtaagccagcaaaccgccgataaagctcaggaaaatcagcgagggcaacattgcccaggtcaacaactctgcacggctggacagcaacgccgtgaaggtcgcgactgccaccgggtacgccttggggttggtcaggccgaacaatatgccgtgccagaacggatgccgcgcggcgccttgtggcgcatcgctgctgcgacgctgggtgcgaatcgcgcgccagccaagccagaacaggtacaggccactgagcacacccagcacgtcaaaggcgctgctgccgacctcccgcgcgccgacaatcgcaatcagcgcggtactgcaccacaccacatcccccagcaaatgcccgcacaaaaaacctgccccggcacggcggccacgcgcggcgccaatgccgaacaccgccaacacgcccggaccaggcgtaataccgtagataaaacccgaagcgaggacggcgagcagcaaggatggggtcatgggcgcgactctgacagacggttgaatggtggatggattctgcacgttatggcgctacgggtaaaacttcattcctgcatagggcttggcacgacaggcttgcaggcgcgaagccagatcaccgacatgcgcttccagcttgtggccatcagggtcgagaaaatagaacgacgcaccttcgctgtggttgtcccgccattcctgcacgctggcggcgcgcaggcgggtgaccaacgcggtgaaatcaacggcatcgacgctgaaggcatagtgggtgtaatcggcagccggggttaaaccacgcaacgggtccagcgacaggcacaaccacaggccgggcaatgacaggtaggcgccattgtcccatgtggcgtccagtttcaactgcaacagttcatggtagaagccgacgctgcgatgcaaatcggtgacggccagggtcaggtggttgaggcctgaaagcatggtgtttttatcctgttagcgtgggtcttcggacaatacagcctgcacccgcccaatcaaccactgcaaccccgaatccccgcctcgtcgcacatgccacgccagctcaaccgcaaacgaggggatatgaaacggcgcaggtacggccaccagttgctgatgatcaatattaagcaaaccccgcgacgatacggtcaggatcaaatccgtgccctggatcaactgcggcgccacgccccagtgcggcaggctgatcgccacgtgccgccgttcacgaatcgcggtcaatgcccgctcgatttccggtgtgccgctgccgcgcatttccagcagcacatgggcccgcgacaggtaggtaggcaaatcgagcacgccgctttccggcaggctgttgcggtccaccaggcaggtgtaatgctcttcgaatagcggcgtggtgcgcagttcagcgggcatgtcgggaaagacgccggcggccaaatcaagatcgccattgagcacgccgtcgaccatgccttcgcggctggcctggatgatttgcaggtcgataccgggcgcctcgcggcgcaacgtgcgcaccagctccggcaggaaaatcgccgcactgtagtccgacatcgccacgcggaatttgcgtttggcggatgccggatcaaaccggtttggcgccagcaatgcctgcacctgggccagggcttcggccagtggcgcggccaactccaatgctcgcgcggtcggcaccaggctgccgccctgacgaaccaacagcgggtctcccagcacatccctcaagcgtgccaaggcatggctgaccgctggctggctgaggtgcaggcgctcggcggcgcgggtcacgtgttgctccgcgagcaaggcgtcgaggatcactagcaggttcagatcgatgcggcgcaaatcattcattagctgcatgccagacataagaaactggaatttaaatttgcgcgacgaatagcctagagtccagaaaaacctctgggagattcaaaaatgacaactctgcattggacaggtttgctggtgctggcagtcatcgccggggcagtggtgccgtttcaaagtgcgatcaacgccaacctcggccgtgggctcggccacccgctgtgggccaccctggcctcgctgctggtgagcattattgtgttgttgccggtgattctggcccttcgtttgccgctgccgagcctggcgtttatcaccaaggcgccgctgtggatgtgggccggtggcgcctttggcgtgtgctttatctcactggcgttgatgttgctgcccaagctcggcgcttccggctttatcgccctggcgatggccgggcagattctcgcctcgctggcgctcgaccactttggcctgttcggcctggtagaacgccaactgacaacgccccgggtactgggggcgttgttgttgatcggcggtgtggtgttgattcaattcagcgccacccccgcccgcgcactggctacggcgggctgatcaacccttgtccagcgtgcgcagcttgtgcggcaagccccacaacagcagcgccgccgccaacagtgcgcacacgccgatcacatacaacgcaggggtggtgctgccggtgaggtccttgatccgccccaccatcaccgggctgacaatgccgccgaactgccccagcgtgttgatcaccgcgatcccgcccgcagcaccggccccggcgccggccagcaacttgggtggcaaagtccagaaggtcggaatcgaggcgatgatgcctgcacccaacatgcccaaggcgatgatcaggaaggtggtgtgatcggcaaaaattccggcactgaaaaagcccaccgcccccaacaccaccaagccgcagacaaacttgcgccgctcgcccgtggcgtccgacaaacgtccgatcaccaccatgctgatcgcaccgcacacatagggaatggccgtgagcaaaccgatcatcaccgggctctcggtaccggcgctgcgaatcagttgcggtgcccagaagttgaggccgtaggacgcaacctggatcagaaagtagatgaagccgagcatcaaaaaacccggaatacggatcgccgacaacagtgagccgccgtgctggtttggctcatgtttggcgatacggctcgacagcaaggccttctcctctgccgtcagccagtgggcatcctcaatgcggtccttgagcatcgtcagcaccaggaaacccaagccgatgcacggcaagccgcccagcagaaacaaccagtgccagccgcgcatctgcaagacaccatcgaggtgttccagcaccagaccggagaaaggcgcgccaaccaagccggcaaacgccgacgcgaggaacagcagcgaggtgatgcgcccacggaaatgctgcgaaaaccacagggtcaggtaatacaacacacccggcgcgaagcccgcttccatcgcaccgatgatgaaacgcagcccgtagaactgccattcggcagtgacaaacaccatcgccgccgtcgccagcccccaggacatcatgatccgtgcgatccagcgccgcgcgccgaccttgtacagcatcatgttgctcggcacttcgaaaatcacatagcccaccacaaacaacccggcgcccagtccataggcggtgtcactcaggctcaggtcggcttgcaactggaatttggcgaagctgatgttgatgcggtcaaaaaacgcgaacaggtagcacaccatgatcagtggcatcaggcgccaggcgaccttgctcaccaggtgtttttccgcgtcgatctcatcagccgtgcgcgcgccggcctctaacgtagtagtgctcatggtttctctccagcgggctgctcaatggcgcccgattgtttttgttgtctggtgcggcgttacagcgtggcgatgtaagccggtggtggatgcaagtcgcaattgcgcccggccttggcgacctggccgggcagttcatggcccagcaaagcgggcaaacggcgggacaagtgcaacaggtgcggcagatcgattccggtgtggatgccaacttcctcgcacagattgacgaggtcttcagtgcaaatattgcccgacgccccgggtgcaaacgggcacccccccaggccgccgagggccgcgtcaaaccgccgggcgccagcttcataggcggccagcacattgcataaacccaggccgcgtgtgttgtggaaatgcagggtcaaatcgcgggcggacacccgctgcaacacccgcttgaccaaacgttccacctgccgcgggttggccatgccggtggtgtcggcgaggctgatgcccgggatgcccagctccaggtaagcgtcgacaatttgcagcacgcggtcttcatcgatcttgccttcgaacgggcagccgaaggtggtggcgatgctgccattgaggcgcaccgggtggtcggcggcaaccctgacaatatcgccgaatgccgccagcgacgcctcgcaatgcatgcgcatattggccaggttatgggtctggctggcggacatcaccaggttcaactcatcggcgcgggactcgatggcgcgctgggcacccttgaggttgggaatcagcgccacgtaaatcacgccgggtttacgttcgatgccctggaacacttgctcgccatcacgcaaggcgggaatggccttgggcgagacgaaggaacccgcttcaatccgcgaaaaaccggcaagggaaagctggtcgatcagggcgatcttgtcagccgtctcgacccaggtcggctcgatctgcaagccatcgcgcggggccacttcctgcacgatcagcgcgtcggaataatcagaaatcattgcaccactcccgaagttttcaggcgttgaatatcggcaccggtcaggcccaggctgccgagaatgtcatccgtgtgctggcccagcgtcggaccttgccagttcacttcgccaggggtttcggacagcttgggcacgatgcccggcatcttcacggacacaccgccgggcagctcggcatcaagcagcatgtcacgcgcctggtagtgtgggtcgctgacgatatcggccaccgagtagatgcgcccggccggcacctcggcggcttccagggcgctgagcacctgttcgatgggcaggctgctggtccaatgggtgatcgcggcgtcgagcaaaccgctcttggcggcgcggccatcgttgtgggcaaattccgctgcatcggccagatccgcgcggccgatggtgttcatcaggcgcttgtagatcgggtcactgttgccagcgatcaccacataggcaccgtcggcggtcaggtaggtgttggacggcgcgatgccgggcaaggcaccgccgctgcgctcccgtacatgcccgagcatgtcgtattccggcaccaggctttccatcaggttgaacacgctttcggccagggacacgtcgacaatctgcccgtcgccctggccggtcttgacccgcagcaacgacatcagcgcgccgatcacaccgtgcagggacgccagggaatcacccaggctcacgcccacccgtgccggtggcgaatccgggttgccggtggtgtagcggatgccgcccatggcctcgccgatcgcgccaaaacccgggcggtcgcggtaagggccggtctggccgtagccggaaatgcgcaccagagtcagcttggggttaatggcgtgcaacacgtcccagcccaggccgagtttttcaaggccgccggggcgcaggttttcgatgagcacatcggcgtcaccgagcagttgcttgatcaggcccagcccttccggggatttgaggtccagtgccagggacttcttgttacgcgattgcaggtaccaccacagcgaagtgccttcatgcagctttcgccatttgcgaagcggatcgccctgccccatggcctcgatcttgatcacttcggcgccaaactcggccatcagccgggcggcgaacggcgcagcgatcaacgtgccaatctcgatcaccttgataccgctcaggggagccgtcatcgggtgtacctcttattcttggaatgtgcggccaagactagaggacacgaacaggggaaatccaaccgtcagttggcaaggagcgttcgcgaatggcgaacactcgaagaccgccatcgcgggcaagcccggctcccacaggtgccagcattccaatgtgggagctggcttgcctgcgatgaggccgtcagggtttcgcctaatccagcgacctgctcaggtattcaaacaacaaccgactcaccggcgacaactgcgccccatcacgcaccaccagtatcaaccgccgatccgaccatgcatccgtcagcggcacggcatgcagccccagcgcgcggccaaacaattcgtaggccttgtgcggcaggataccgatgcccatgtttgcctggaccatccggcacatcgcatcgaaccccggcacatggatgcgcaggcgcaaagtctggccggcctcacgcgcggcggcgtgggtgcgcatattgatggagctggccgcatgcaggccgacgtaatcgctgcccagggtttcggcaaacgccaggctcgtgcgcgacgccaacgcatgatcggcgggcatcagcaccaccagtttgtcgtggcgatagagcacactcggcaggcctttggtgtcggtatcgctggaacagatgcccaggtccgccacgccatccagcacgccttgcaccacaccatggctggggcgttcttccagatcggttttcacttcggggtgcagttcggaaaagccccgcagatcctcgggaagaaactggatgatcgccgagaggttggccagcatcctcacataaccgcgcacgccgtggctgtgctcgcccaactccaggcccattttttcgacgttgaacagcatctgccgcgcgtggtgcagcagcgtctcaccggcagccgtcaggtccatgcccttggcgcgccgcacaaacaggctgacgcccagcacctgctccaactccatcaagcgcttgctggccgccgacacggcgatggcttcgcgggcagcggcgcgggtcagcgtgccctcctcgaacaccgccacaaacaactgcaaggtgatcaggtccaggcgccgcaccagactcttgtgcaacatcagcggcgctcgtcggccaagcgattgattgccgcttgctcaaccaccggctgcggcgcccccacacttgctgcctgcaacattgccctgcccaccgtttcggtgctgatcacccaacccggtttgatccggcgaaagaatgaaagcaatggcccgagcacggtatagaacgattgatacagtggcgtcttcgagcgcacgccatgcaacggctggatcaccccgggccggaacaggtacaccgccttgaacggcagccgcagcaaggcgttctcggtcttgcccttgacccgcgcccacatcgatttgcccgcctcggaactgtcggtgccggcgccggacacatagacaaaggtcatctgcgggttgagccgcgccagggtgctggccgcgaccagcgtcaggtcataagtcaggtgggtgtacttggtttcattcatgcccgccgacgacacgccaaggcagaagaaacacgcgtcaaagccttgcagcaggttctccaggggctggaaatccagcatgtcgctgtgcaacacctggtgcagcttgccgtgttcctgggtcaaaggcgtgcggccgacggcgacgacttcctgcacgtcatcagccagcaggcactcgcgcagcacgccttggccgaccatgccggtggcgccgaaaagcagaactctcataggggggacctcagcggcaagccgcaagcttcatgctcaagttgaatgcagatcagcttgtagcttaacgcttgccgctcaaggctgcccctatcaaaacgcgctgcggaaaatctcctcgatctgacgctgatcagcccgccgagggttggtcagcccgcacgcatctttcaacgcattggtagccagcaacgggatgtcctgcaacttggcgcccaactcacgcaagccggcggggatttcaacgtcctgagacagcgcgcgaatcgccgcgatggccgcctgggcgccctcctccggcgtgatccccttgatatcggcgcccaacgcgcgggccacgtcgctcaagcgcttggcgctgacgctggcgttgaagctctgcacatggggcagcaataccgcattgcacacgccatggggcaggtcgtacaaaccacccaattgatgcgccatggcgtgcacaaaccccagggacgcattgttgaaggccatcccggcgagaaactgcgcgtacgccatgttttcccgcgcggccttgtcgctgccatcgcgcacggccaggcgcaggttggcgctgatcagctcgatggccttgatcgcgcaagcgtcggtgatcggcgtggcggcggtggacacgtaggcttcaatggcatgggtcaaggcgtccatgccggtggcggcggtcagccccttgggcatgccgaccatcagcgccgggtcgttgaccgacagcagcggcgtgacgttgcggtcgacgatggccattttcacgtggcgggtttcgtcggtgatgatgcagaaacgcgtcatctcactggcagtgccagccgtggtgttgatcgccaccagcggcagttgcggcttgctggattggtcgacgccttcgtagtcgccgatatgcccaccgttggtggcacacaaggcgatacccttggcgcagtcgtggggcgaaccaccgccgagagacaccacgaaatcgcaggcattggcctccagcaacaccaggcctttctcgacgttttccacgttggggttgggcttggcgccgtcgtagatcaccgagtcgatgtcctgcatcgccagcttctcggcgatcatgcccgcgacgcccgcctttgccagccccgcgtcggtgacgatcaacgccttgcgaaagccatagttgcggatggcggtcatggcctcgtcgaggcagtcggtgcccatgatgttgacggcgggaataaagaacgtgctgctcatgaaaaatcctcggaggcgttatgcctacagcatcaacctgtgccgtgtggcgcatcttgatcaggatcaacaccagctcgtgataaagtcagcgcccagctgattttgagtagacccgccgcaatgaaggatttccaggatattgacgcccacctcgaagactggaacgcagtgcgcgctgcggccgacttcagcgggattctgatcggcaacggcgcaagccgcacgatttgggaagactttgcctacgactcgctgttcgaaaacgcgcgcacagtggaagaaaaacccctgagccaatccgaactcagcgtgttcgacgccctgcaaacccgcagtttcgagcaggccctgggcgcgctcaaaaccaccagccgggtcaacaaggccctggccgtcagctcggcggcgccacgcaaccgctactacgcgatcaaagaggcgctgatcaacaccatccacagcgtgcacatcccatggcggttggtgcagccatcgacactggcgacgatcaacagcgaactggcgcgctacgccacggtgttcaccagcaactacgacctgctcaactactgggcgatcctgcacacgccgggcatcgacgacctgttccgcagccctgacgccagcttcgacctgcgcacgacgcacaccgacgccacgcgcatcctctacctgcacggcggcctgcacctggtgcgtaacctcgatggcaccgcccgcaaactgccgtccaccgacagcaccttgctcagcagtttcgcgatcaacaacacgatcaagacgctggatgatgtgccgttatttgtcagcgagggcaaagttgaggagaagctcaagaccatccgcagttcggattatttgtcgttttgttatgaacaactgctgagccatgaaggcgcgctgtgcatctttggccatgatctggggccgcgggatcagcacctggtggatgcgattcgtcaggccaggctcaccacattggccatctcggtgtcggggcgcagtgacgggtttattcgtcagcagaagcggcggtattcggagttgttcgacggtaccggtgctgagttgaaattctttgccgcgcgtacgcatccgctgggcaacccggcactgtccgtccccgtcgaacgctgagttcacgggcggcttcggtcaactgtgggagctggcttgcctgcgatagcggtgtgtcagcttgcacatttgtcactgataaacagctatcgcaggcaagccagctcccacagtttgaatgcatttcaaatgtcgattggggtcattcttcagaactgtgcacgaccaccagcaactgcgcctgcacctctcccaccgagcgaatccggtgcggcttctgcgcattgaaatgcagcgcatcgccccgcgccagaatcacccgctcgttcatgaaatccacctccacctggccttcatgcacgaacagaaactcttcccccacgtgctccttgaaggtcttgtcggtgaattccgccggcggatagatgatgaacggcagcaggctgcgctcgctgacctgatgggcgagcacggcgtaacccggcgccgtatccgggcgctcatggctgcgcaccaggctgtactggtcgaggctcacgctgtcttcgctgaacagctcttcaaccttcacgttcaatgccttggccagtttcagcgcggcggcaatcgacggcgtgttgagcccgcgttcgaccttggacaggtaactcttggtcatcccggatttttcagccaacacatccagggttacgccaagtttttttctcaataatttcaaacggatagacatgtgctgcggttaatccatgcagaaaggcgagagctgcgcttgccaatgacacaaagtgtcatatagcatcgttagtgtcatttgcagccaccgagggcacccgatatggccaagacattagcactccccaaagaccaactggtcaagcaagcgctgatccagatgcaaaataccctggcggataatacgtggaccgaccggcaaaagctggcgctcacttgccgcatcctgttcgaacacggtcacgactccggcctggccgggcagatcaccgcacgcgggcccacgcctggcacctattacactcaacaactgggcctgggttttgatgagatcaccgccagcaatttgttgttggtcaacgaagatcttgaggtactcgaaggccacggcattcccaatccggccaaccgctttcacacttgggtgtaccgcgggcggccggatgtgaactgcatcatccatacgcacccgacgcacatcgcggcgctgtcgatgctggaggtgccgttgcaggtgtcgcacatggacctgtgcccgctgtacgaagactgtgcattcctggaagcctggccaggcgtgccggtaggcaatgaagagggagaaatcatcacggcggcactgggcgacaagcgcgcgattctgctctcgcaccacggccaactgtccaccggggcgagcattgaggaggcctgcgtaatcgcgcagttgatcgaacgcgccgccaaattgcagttgctggcgatgtcggcgggcagcatcaaaccgatcctgccggagcttgggcgcgaggcccatgactggatctccaaacccaagcgctttggcgctgcgttcaactactacgcccggcaaaacctgcgcaaacacgccgattgcctgaactgatccccctttttcgcagcggagacttcccatgtccagccccaaccttcacggcatcatcggctacaccatcaccccgttcagcgccgacggctcgcgcattgacctcgacgccctcggccgttccattgaccgcttgatcgccagcggcgtgcacgccatcgccccactgggcagcaccggcgagggcgcgtatttgagcgacgccgagtgggacgaagtcagcgcctacagcctggccaaaatcgcccggcgcgtgccgaccattgtcagcgtgtccgacctcaccaccgccaaagccgtacgccgcgcccgctacgccgaggccaatggcgccgacgtggtgatggtgctcccggcctcgtactggaaactcagcgaggcggaaatccttgcccattacgccgcaatcggcgacagcatcggcgtgccgatcatgctctacaacaacccggccaccagcggtacggacatgtcggtagagctgatcctgcgcatcatcaagcaggtggccaacgtgaccatggtcaaggaaagcaccggggatattcagcgcatgcaccagttgaagcgcagcagcgacgtgccgttctacaacggctgcaacccgctggcgcttgaagcctttgcggcgggtgccaaaggatggtgcacggcggcgccgaacctcattccccaattgaatctggatttgtacgacgcagtgctggccaatgacctgacgaaggcgcgcgaactgttctatcgccagctgcccttgctggagttcatcctcaagggcggtttgcccgcaacgatcaaggccgggttgcgtttgaccgggttggaagtgggtgatccgcggttaccggtgttcccattaagtgacgccgggatcgaacagctgaaaacactcctgcgctaacgccgcagcccctgtgggagctggcttgcctgcgatagcaacaccacggtctttcaattgaaccgaggcgatgccatcgcgggcaagcccggctcccacaggaaccaggtcccatatttttgacgagcagatttcttacatagagacaaatgacaatagttctcgatatcattcacgacttttctacgtcgtgcttcgtcaagaaggatatccatgtcacgtccaaagcccgacccgttgtcggccgatgcctttcgcgggttttatgcagacattctgcatttcctgcgcaagcgcaccgacaacgccagcgacgcagcggacatgacccaggatgtcttcacccaatggctggactaccgcgaccgggccaaggtcgagcagccacgggcgtttctgttccagatggcgcgcaacctgctgcgtgatcactggcgcaaacagaaggtgcggcagaccactcaccccgaccaggccgaaagggatgccgagccggtcgccgacgagcaaaccgaccccatggccgccgcgcagcgcttgcaacgcctggaacagttgaaagaagtcctcgcagaactctcgccccgcaggcgagaagcccttatgctgcaccgcttcgaaggcctgagccaggcgcagattgccgagcgcatgggcatttcgaccagcatggtggaaaagcacatcgcttttgccctgctgcactgcaagcgacgccttcaacacgaacccggcacggagcagccagaatgaaccgcctgagcgacattgacgctttggacatcgaacgcagcgactccatcgatgcccaggccgccagctggtttgcccgcaaccgcagcgaagcggggcgagccgaccgcaaagcgtttgccgactggcaggcaaccccggcccacgcgcgcgcctacgctgaattcgagcaactgtgggccgacctcgcccagttgcagcaattgaacaaacccgtggcactgcccaagcgcaaaccgtcgatgtggcgcccggctctcgccgtagcggccgcactggtgtgcgcagtgatgaccaccaatgtcggcgctccgcgcgcgctgtatcacgcccaagtcgccgcccacgccaaaggcatgcgtaccctgaacctgcccgacggcagcaccttgtatgtgaatgccaacacgcgcctgcgcctggagttcagcgctcatcaacgcatcattcacctggacaagggccagttgtacatcgaagtcgccgccgacaaagagcggccgctgtatgtgcaggccggcgaggcgaatgtgcgggtggtcggtaccggttttgacgtgcggcgcagccagcagcagctggtggtcagcgtcgcccatggccaggtcgcttttgaacccgacggcaaaagcccggtggccctgctcggcgcccaacagcgcgccatctacagctacaccaaggccagcctgcagcagcaaaccctcaccgcggaagaagtcgcggattggcgcagcgggcacctgtcctttcgcaatcgcgaactggcgagcctgatcgacgaactgagcctctatcgcccccaggccccgttgcaggtgagtaaagccgtagcgcaattgaaggtgtcaggcaacctggatgtgaatgacccggatgccctgctcaacgccctgcctgccctgctgccagtgaaaaccgtggcctcggccgacggcattgtgagaatcgaacccagcaaataaggcgcccccggcacacacttgagaatattttgcattcgcatgtgtggatttttttgcctgccccgtcttcttcccgactgtgtttgatacgcacacctttttggccatttggccaccccgggggatttcatgtttcgcgcgccttgccacgcttcgcacctgtttcttcgaccgtccgtcattgccgcctgcatggtcgtgagcctcacggcccaggccgactcgctcacgctgcagctgcccgcccagccgctggccacgtccctgagccaggtcgcacagcaggcgaaaatccagctgctgttcgatgagaccctgctcaagaacgtgcaggcgccagcgctcaatggtgactacaccccggaagtagccatccgaacgttgctgaaaaacggtgagttcaccctgatcaaagtcggcaccacctacgtggtgcgccccgacgaaggcaaaaccactcacagcggcgcgatccagctggacgccctcagcgtgatcggcaccggcaacgaagtcgactccagcaccgtcaaccgctcgaccatgacccaggccgacatcgaccgctaccagtccaataacatccccagcctgttgcagaccttgcccggcgtgagccagggcggttcgctcaaacccggcggccagaccatcaacatccgcggtttcggcgatgccgaagacgtaccgatgaccgtcgacggcgccaccaaaaccgggtttgagcgctaccagcaaggcaccgtgttcatcgagcccgagctgatcaaaagcatcgaggtcgagaaaggccccaactcgccgttcaccggcaacggcggtttcggcggcacggtaaacatgaccaccaaggacgcgcccgatttgctccaggacggccgcaacagtggcgcgatgctcaagtacggttactccagcaacgaccacgaacagatttacagcagcgccgtgtatggccgtaccgacgacggccgtttcgacgcactcgcctacctcacccaacgtgacggcggcgacatgaaggtagccgccaagctgcccaacgagaacaaccaatacccgatcaacccacagcgcctgcccaacagcgcccaggatgtggacggcaaactgttcaaggtcaacgcgcatttcaccgaggaacacagtgccggtttttcctactcgcgctcccacagcaaccgctggacaccgttctccgccgccagctacccgacgccgccgacccaggccaacatcgaccgctatggttacgaaaacgcgttgaagcgttttttggcccagcgtgacaccaccgacaccacttggtcgggcaagtacgaatacacccccgcgaacaacccgctggtggacctgaccatcaagtattcgcagtccaacaccgaccagaccgacgagcgcgacgccacggcgtttttccagctggccaccggcgggcgcaagatggacacggcctacaccgacaagaacctcgacatccgcaacgtcagcctgttcgacaccggcccgttgcagcatgccgtgaccgtcggcgggcagattcgcaagcacatccgtgaaaccgaaatgtggatgcccggcgccacctacaacactgcgcgctataactacgggcacttccagccaggcttcatgccccacggtaaggtcgatacgaacagcttcttcgtccaggatgcggtgacggttggcgatgtgaccatcaccccgtccctgcgctacgaccacgtgcgcaatcgcggcgaaggcaacgacgcgccgtactacgacaaccccgatccgtcgttcggtcatgactacagcgaccgcacctacaccggctggtcgccacgcttggcgttattctggaacgtcacccccaacctgggcctgttcgccaactggagcaaaacctggcgtgcgccggtgatcgacgagcaatacgaagtgcaaggcctgggcagccgcaccgccaccagcgtcgacctcgacccggaacgcatcacttcgatcacggtgggcagtgtcagcagcttcgataacctgattgcgcagaatgacaacctgcaggtgcgcaccacgtttttccacaacaaggtcgaggacgaaatcttcaaggccacgggtgtcggctgccagaaccaggccatcaatggcggcagcatcgccagcgcctgcccctcggggccgatggccaactaccgcaatatcggcgggctgaccatcaaggggtttgaattcgaaacctactacaactccacttacctgttcggctcggtgtcgttcgcctacgccaaaggcgaccacgaaggcgcctacaccaacccgtgggggccggatgtggcggcgcgggatattccgccgaccaaatgggtgctggtgctcggcaccaatattccggcgtgggatgcccaggtcggctggaccggccaattcatcggcgccacagaccgcctgcccagcgataaatactccggcggcccgggcagcgccgtgggtgatttgttctacgaccaatacggcaacaagcgctacaacacccaaggcctgttcgccaaatggaagccgcaacaggcttacctgaaaggcaccgaagtgaacttcaccgtcgacaacctgttcaacgaaaacttccgcccggccctcagcggcgaccgcgcctacaccaaaggccgcgatgcgaagatcagcgtgacgcgcttcttctaaacccgtgtgggagctggcttgcctgcgatgcagacacctcgatttgtcagtaaaacagaggcgatcccatcgcagcctcgccaaggctcgacagctcccacagtagatctgcggtgaatagagatccactgtgggaactggcttgcctgcgatacagccacctcggtttgtcagtgaaaccgaggcgatcccttcgcaggcaagccagctcccacatttgaacttcagtgcctgagcaaactgtacggataaatcagccttcagctgtaagcccgcaatgggcgggggttgtggctagatgggcttcccttgaagcccttttgaacccggtccccccaccatgagctcgcgcgaaaacaccggcatggccctcggcctgctgggcgtcatcatcttcagcctgaccctgcctttcacccgcatcgtggtgcaggaaatccacccgctgctcaacggcctgggccgtgcgttgttcgcggcaatcccggcggcggcgttgctactgtggcgccgcgagcgctggccaacctggcgccaggtgcgcgggctttgcctggtgatcgccggggtgattctgggtttccccgtgctgtcggcctgggccatgcaaaccttgccggcgtcccatggtgcactggtcaacggcctgcaaccgctgtgcgtggcgctgtacgcggcgtggctatcccatgagcggccgtcgaaagccttctgggcctgcgcagcgctgggcagcgcattggtgttgagttacgcgttgatcactggggccggcagtattcaggcgggcgacttgctgatgctcggcgcgattgccgtgggcggtttgggctatgccgaaggtggccggctcgccaaggagatgggcggctggcaagtgatttgctgggcattggtgctgtcaacgccggtgttgatcggcccggtgtggtacctggcggcgcagcacgagggtgcgatttccatgcgcgcctggtgggcgttcgggtatgtgtcgttgttctcgcaattcctgggttttttcgcctggtacgccgggttggccatgggcggcattgcgcgggtcagccagattcaactgctgcagattttcttcaccatcgcgttttcggcgctgttctttggtgaacatatcgagccgattacctggttgtttgcctgcggggtgattgtgacggtgatgctgggacgcaagacggcggtgcagacagccccagttggcaagccgaacaccgtctaaatgtgggagcgggcttgctcgcgaatgcggtatatcagtcaataaacgggtggctgacactccgctttcgcgagcaagcccgctcccacaggggttgtgcattcagctcaagaggccatccgcacgcagcagggtttccaggcaatgctcggtgatgtggtagaacgccttcaattcctgaattttctccagcaactgcgcgttgtctaacggctccgcgcgtttcaccgcgaggatcatcttgttcttgttggtgtgttccagcgagatgaactcgaacaccttggtctcataaccgcaggcttcaaggtacaacgcacgcaggctgtcggtgaccatttccgcctgttgccccaggtgcaggccgtattgcagcatcggcttgagcagcaccgggctctggatctgcaggcgaatctgtttgtggcagcacggcgaacacatgatgatcgacgcgccggagcggatgccggtgtggatcgcgtagtcggtggcaatgtcgcaggcatgcagcgcgatcatcacgtccaggtcgctgggcgccacgctgcgcacgtcgccgcatttgaacaccaggcccgggtgttccaggcgcgcggcagcggtgttgcacagcgtgaccatgtcttcgcgcagctcaacaccggtgacttcgccttcggccttgagggtgttgcgcaagtagtcgtgaatggcgaaggtcaggtagcccttgcccgagccgaaatcggcgacgcgcaccggctggtcgagcttcaacggcgatgaagtcagcgcatggctgaacacctcgatgaacttgttgatctgcttccacttgcgcgacatcgacgggatcagcgcttgcttggcgtcggtcacgcccagatcggcgaggaacggccggctcaggtcgaggaagcgattcttctcgcggttatgctcggccgatggggcctcgcgcaactgctgcggcttgcttttgaacagcgagcttttgttcttcttgctgtactccagctgggcttcgtcggtcagcgacagcaaatgcgcgttcttgaacgacgccggcagagactcggcaattgccgccacgccttcggccagcgggaagttcttggtgatatcgcgggtcttgtagcggtagacgaaggacaggcaagcctgctccttgaccgtcacgggcttgatgatcagccgttgcagttcagcctcctcacccacgtacttggccagcaccagcttgataaaggcgttctgcgaaaggcttgcgctcagcagttctatgaactgggcgtgatggtccggcgcagggcgcacaggttgagcggtgacggacatgaacaaaaacgcctcgggctgggaatgccgggcattttaggggggataggggttgagggcacggggttatttgatcaacggtcgattcttacaacctggagcgggctgtgtgggagctggcttgcctgcgatgcaggcacctcggtgtatctggcaaatcgaggggatgctatcgcaggcaagccagctcccacacaagccagatcccacagagagatcagtgtgccaaggttattcgagcacgattaaacggttgggcagctcattacgcgtctgcgtcaacggcacatgcaccttgagcaattcaccacaggcttcaatgcaggcaataaaaccggccagcgtctgcccctgtttcacttgttgggtaaaggccttgacgatcacgtcccagctgccgtcatccagacgcttggagattccgtcatccaccagaatctccacgtaccgctcggcctcgcagacaaaaatcagcacgccggtgccgcccagggtgtggtgcaggttctgctccaggaactggcgtcgcgccaggttcgatgcacgccaatgccgcaccgagcgggggatcaagcgcgtggtgaccctgggcaaacggaacaccaggcacaacacgataaacgtcgcccactgcgccaacagcaaggtgtacatggtcaggtagcccgacaggtaatgcaccacgccgggcaccaccaaggcgatcaaactggcccacaacagcgggatgtaggcgtagtcatcggcgcgggcggccaacaccgttaccagctccgcgtcggtggttttttccacccgtgcgatcgcttcagcgacctggcgctgctcatgttcagtcagtaatgccatggttgtcgttgctctctcattattatcgtcaccagccgcccgaggccccgccgccgccaaacccaccgccgccgccccggaaaccacctccgccgcctcccccgctgccaccaccacggccgctgctgctgagaatggccagcaggatagcgccaaccggcaggcccaggcgattgcacaaccacaacacaccgatcagcaaaataaacaggccgatggaaaacccgggattatccttggcgaagttggcatccgccacatgggccggcaccgccagcggctcaccgcccaccacctgcagcatcgccgcaacgccgtcgctgatgccctggctgtagttgccggccttgaacttgggcgcgatcacctggttgatgatcacccacgactgcgcatccgtcagcacgccttcaaggccataaccgacttcaatgcgcaatttgtgctcatcacgggcgacgatcaacagcgcgccgttgtccttgcccttctggccgatgccccactggcggcccaactgataaccgaaatcttcgatagccgcaccctgcaggtccggcaccgtgaccaccacaatctggtcacccgtggtttgctccagcgcttgcaactgctgagtcaactgctggcgcgtggccgggtcgatcatctgcgcggtgtccaccacccgcccggtcagcgccggaaaggtcagcgccgcctgggccgtcatggcacccaacatcagccacagcgccaggcccattcgtattagtcgcatcatgcccccttggcctgtgaatgcttcactaccagtttccggtagccccgccgccgccgaagctgccaccgccgcctccggcattgtcagaacgcttgtcactgtcagccgggcgcggtgtttcgtcgtcatcgtttggcgtggtcggttttccgtacttgatcaccacaaaaccgatgaccagcacaaacaccccggccagcgcgaagatcaaccacacccactttttactctgggccttggcgtgcaccggctgcgcgcccagcacctggatcatggccgcaacacccgccgtaatgccctgggcgaactggttctgtttgaatttgggcaagatcacctggttgatgatgaccgagccttgggcatcggtgagacgatcttccaggccataacccacttcgatccgcacccgatgttccgctggcaccacgatcaacagcgcgccgctgttcttgcccttctcgcctacaccccagtgacgcccaagcctgtagccgaagtcttcgatggtattgccacgcaagctgcccagggtcacgaccacaatctgctcgcccgtctgttgctcatgcgcgtccagcgtgtgcttgagcgccgccgtgctggcggcgtcaagcaggcctgcacggtcgacgatgcgaccgtccaggtgggcaaactgctcggtgatcaaggcgtccaccgactcattcgagtcggcagccaacacctgaccacacagcaaaaccgcggcgaacaacaggccacgtaagcccatcagaatttcacttgcggcgctttgtcagcatcggcactggtggcctcaaacgtggcgcggatcggcaagtcgctgtacatcacgctgtgccagaggcggcccgggaaggtacggatttcagtgttgtaggcctgcacggcctggataaagtcgcggcgggccacggcaatacggttttcagtgccttccagttgcgattgcagggccaggaagttctggttggccttgaggtccgggtaacgctcggacaccaccatcaaacggctgagcgcaccgctcaagccgtcctgagcctgttggaattgtttgagtttctcggggttgtcgagggtgctggcgtccacctggatcgaggtggccttggcccgggcttcaatcacggcggtcagggtgtcctgctcatgggcggcatagcctttgaccacttccaccaggttggggatcaggtcggcgcgccgttgatactgattctgcacctgaccccaggccgccttggcctgctcgtccagggtggggatgttattgatgccgcaaccgctcaacaccgcacctatcagcagcaatgcagccgccttgaagccccagcgatatccttgaattgtagtcatatgtttctccgcgaccttcctgtgaaatttgataaccctgtaaaacctgtgcctggggcataatccgccaccactggcatgcttgcagccaatcagctaaaagatgcctggcacgaaccagagttcagatgggtgctgcacttgtctgacataacacccgaacaacaacatatgttccaaacactttggccgagcagcgtgccctttgtcgctgcgcagtacgccacgaaaggaaattcatgaagaagctgtgtttgctcggcctagtggccacactggcctgccatcccgtctgggccgaaacagcgcccgccgtactcaaggaaaaggacgcgttcgtcaacgacctgctcaagcagatgaccctcgatgaaaagataggccaattgcgcctgatcagcatcggccccgaaatgccccgcgagctgatccgcaaggaaatcgccgccggacgcatcggtggcacgttcaactctatcacccgcccggaaaaccgtccgatgcaggacgcggccatgcgcagccgcttgaagatcccgatgttcttcgcctatgacgtgatccacggccaccgtacgattttcccgatcagcctggccctggcctccagctgggacatggacgccatcagccgctccgggcgcatcgccgcccaggaagccgccgccgacagcctcgacatcacctttgcgccgatggtcgatatctcccgcgacccgcgctggggccgtacgtccgaaggtttcggcgaagacacttacctcgtttcgcgcatcgccgaagtgatggtcaaagccttccagggcgtgagccccgccaatgccgacagcatcatggccagcgtcaagcacttcgccctgtatggcgcggtggaaggcggccgcgactacaacgtggtcgacatgagcccggtcaagatgtaccaggactacctgccgccgtaccacgcggcgatcaaggccggttccggcggcgtgatggtggcgttgaactcgatcaacggtgtgccggccaccgccaacacctggctgatgaacgacctgctgcgccgcgactggggcttcaagggcctggccgtcagcgaccacggtgcgatcttcgagctgatcaagcacggcgtggccaaagacgggcgtgaagccgcgaagctggcgatcaaggccggcatcgacatgagcatgaacgactcgctgtacggcaaggaattgcccggcctgctcaagtccggcgagatccagcaaagcgacatcgacaacgccgtgcgtgaagtgctcggcgccaagtacgacatgggcctgttcaaagacccgtacctgcgcatcggcaaggccgaggatgacccggccgacacctattccgaagaccgcctgcaccgcgccgacgcccgcgacatcgcgcgccgcagcctggtgttgcttaaaaaccagaacgacgccctgccactgaaaaaatccgcgaccgtcgcgctggtcggcccgctggccgatgctccgatcgacatcatgggcagttgggccgctgccggccgccctgcgcagtcggtgaccctgctcaaaggcatgaccgacgccctcgccggcaaaggcaagctggtgtatgcacgcggcgccaacattaccaatgacaaagcggtggtcgactacctcaacttcctcaacttcgacaccccggaagtggtggatgacacccgctcgccgcaggtgctgatcgacgaagcggtcaaggccgcgaaaaacgccgacgtgatcgtggccgccgtgggcgagtcccgtggcatgtcccacgaatcctccagccgcaccgacctgaacatcccgcaaagccagcgcgacctgatcaaggcactcaaggccaccggcaagccgctggtgctggtgctgatgaacggccgcccgctgtcgattctcgacgagaaccaacaggccgacgcgatcctggaaacctggttcgccggcaccgaaggcggcaacgccatcgccgacgtgctgttcggtgactacaacccgtcgggcaagctgcccatcaccttcccacgctcggtggggcagattccgacctactacaaccacctgaccattggccgaccgttcacgccgggcaagccgggcaactacacctcgcaatacttcgatgacatcaccgggccgctgtttccgttcggttatggcctgagctacaccacgttcagcctgtcagacatggcgctgtcgtccactaccctgaacaagaccggcaagctcgacgccagcgtcacgttgaaaaacaccggcaaggtcgacggcgaaaccgtggtgcagctgtatatccaggacgtggccggctcgatgatccgcccgatcaaggagctgaagaacttccagaaggtcatgctcaaggccggtgaagagcgcacgctgcacttcaccatcaccgaagaagacttgaagttctacaacacccagctcaagtacgcggcggagccgggcgagttcaatgtgcagattgggcttgattcccaggctgtgcagcagcagacgttcgagttgttgtaacactcgcagccccctctttcatcgaagagggggctttcaccctcgcctggcttcaaccagcaaaaagttagatttcactctcaccttcaagcatcaccctacatccttgccctaccccactcgcacaccctgtcctccccaaataaacaggcaggtgagtggactatgtcgtccattgagaaagtgtggtgggcagcccgcaacgcgccccttcaatcatcgttcaagcaaaatgcgctcgcgctctgtgtgttggccgccctgtcgggcatgcccgtcgaagccgcaagttataccgaatcaggccggctacacgacgctgccagttggcgcagtgaagagttcaaaaagagctgggggctgggggcgatcggtagcgactacgcctacgccagaggcttgagtggctcgggtatacaggtagcggtttacgattccggcaccgacttgcgccatcacgagtttaccggcaagccgcattacggcgtgcgtatggcggacccgggctgtgcgagcgaaacggtgctgtccggtggttgttttttcagcgaaggtgatcgttctgaagtcaatgtgctcgactcactgccgcccgaagccctgcccggccttgaggatgccatcgccagcggcgacctcacccgggagcaggtcgatgactatctaaaaaacacaggcgcccgatacaactcccatgggactttcgtcgcagccagcctgcttggcaaccgcaatggcatcggagctcacggcgtggcctacgccgcgagcgtgagtgctgtgcgcaggttcagcaatacttatcaaaacgcgccgggtgtacagccctatagcgttcccaccccgacgccggaagccgtcaacgccgcctacgcccagttgcacgaacaaaatgtgcgagtggtcaatcatagctgggggcccgctgtgctactcgctgatgaggcggcgctggacagggcgcttggccagacccatacccgcgtctatcaagaactcaacgccatcgctgacggcgccatccaatacggcatgctgcaagtctgggcggcgggtaacacgttcaaacccaatgaatccccccaaacggcaccgtttgccgagatccatgccagcctgccaagggccattgccgaagtggagcgctactggttgagcgtggtcaacgtgaaccaggcgctgaccttgagcgagggttcctaccgttgcggctttagtaaaggctggtgcctcgcggctccagggacagacattaactcggcttgggtcagcggttcggtaacgactgaaacccactttgataacgacggtgaggcggatggtttcactgtcactggcgacaacccggcgtttggcgagctcactgcctcgggcacctccatcgcggccccgcacgtcaccggcggcctggctctcttgatggagcgtttcccctacctcgataacccgcaaatccgcgatgtcttactgaccaccgccactgaccttggcgagccaggtgtcgatgatgtctacggctggggcctgatggacctgaaaaaagccatcgacggccccggccaattacgcgtcgacacccacgtcaacatggaccgccccgcaggtggcgcaaaagtctggcaaggcggtgcctgggacgattggcgcaacgacatcagcggcccgggccgcctggagaagtccggcatcggctggctgcgcctgagcggcaacaacagttttgccggggccacgctcaaggaaggcatcctcgaactggatggcgaaaaccacctcaagggcgacgtaaacctggaaggcggcgtgctgcgcctcaatggcaacctggctgttcagggcgactacacccaagcccccggcacaaccctgatgaccggcctggtccctcaggcggatccggcgaggctgcaggtcggcaatcaggcgtccatcaacggcggcacgctgtacctgagcgcgcaacccgatagctacccgctgggccaacgctacagcatccttgaggccaaaggcgcagtgagcggtgagtttgccaccctcgatagccgcgagttttcgcctttcctcagcgctttccaggtcaagcagggcaatgatttgctggtggagttcggtcgcggccggtcactggcttcggcggccaacacctccaaccaacgcgccgtcgcagcggctgccgacactcaaaccgcgccaaccccgctgctgcaacgcttgaccgcgctgtttcccgcacaagcaccttcggcccttgaccaactgagcggcgaactgcatgccagcacccaggcggcgctgatcgaaaacagccgcgtcgtgcgtcaggcggcgctggaccgacaaagtaaccgcacagcccgacacgacgcattgaatagcggcgcctgggtgcaactgccccgccagtccggccagctcggcggtgatggcaacgccgcgcgcacgtcccatagcagcaacggcctgctggtcggcttcgaccacaggttggaacaaggcacgcgtgtgggggtagtggccggtagcggcagcagcgaggtcaaggctggcacacgcggcaaggcaaatatcgacagctaccaattgggcctgcacgctggccataactgggatgcttttggcctgtatgccggcatcgcttacgcgcagcatcaggtccaaaccaaacgccgcgtcagtttccaaggcgtcgagaatcgcctttcagccaattacgccagccgcaccgtgcagacgtttgccgaggccaactacacgttcagccatgacttctgggactggcaaccgtacctgcaactggccaatgtgcagcagcgcagcgacgggttcaccgaacggggcggcctggccgcattacgcggcaaacgctcgaaggaaagcgtcaacctgacaacaggcggtgtgcgtttgaacctggatttgggcaaggcgcaaatcggcccttcatggttgagcctgcggggtgggttagcctacacaagcgccagcggcgacctgcaacccggagcccaaacggcttgggagggcggccgtacgctgaatgtcagtggcgcaccgcttgaccgccgcagcacccgcctggaactgggggccactgcgcgcctgacaagcgccagcgccctggacctgagtttcagccagcaacgtggtgaacgtacgcgggaccaaaacatcaccgcgcagtactcgctgcagttctaagtgccacggcgggggtaccctacccccgccgatccaacaggttgaccaccaaccggtcaatccagccccacacccgctgcttcacccgccgccacaacggccgcgccctccaggcctccaggctcacggcctgactctggacaaagtcccgttcaaaactgcccgccaccgcctgcgtcaattcagggtccagtgcctccagattggcttccaggttgaagcgcaaattccagtggtcgaagttgcacgagccgacgctgacccagtcgtccaccagcaccattttcaaatgcagaaagcacggctggtattcaaagatctgcacaccggcgcgcagcaagcgcgggtaatagcggtgccctgcgtaccgcacggacgggtggtcggtgcgcggaccggtcagcaacaaacgcacatccacgccgcgcccggcggcgcggcgcaaggcccggcgcacgctccaggtcggcagaaaatacggtgtggccagccagatgcgttgctggctgctgttcaaggcgcggatcagtgattgcaggatgtcccggtgctggcgggcatcggcgtaggccacgcggccaagccctggcccggtcgccggcactttgggcaaacgtggcaaaccaaaatgtttggcgggtttccattcacggcgcgcagcgttggcatgccactggcggtcaaatagcgcctgccagtccagcaccagcgggccactgatttgcaccatgacttcgtgccaatcggcggtgtcctggcccggcgtccagaattcgtcggtcacgccggtgccgccgaccacggcgatggtctggtcgatcagcaacagcttgcgatggtcgcgatacaagttgcgcatccagcgccgccagctcaggcgattgtagaagcgcagttccacaccggcatcggtcaagcgtttacgcaggcccagggtaaacgcgaggctgccgtaatcatcaaacaggcaacgcacctgcacaccacgttcggcggcgagcaccaacgcttgcaccatagcttctgcacaggccccggcttccaccaggtacaactcaagatcaacctgctgctcggcccgggcgatacccaccagcatctgcggaaagaacaccggcccgtcgatcagcaactcgaaacggttggcgctgcgccacgggaacactgcgccgctcatgtcagcgcgccgtgaaaatcagcaccgcacccaccggtaccgacaaactgatcgactcaagccccgccaatttgcgcaacgcggcgacgccgggcgccaggtcaaactcttcggcatgcagcactaccggctccagggtaacgacttgaaagcgtcggtcatccaggcgcgtggccagtatttcagcactgtaggtctgggttttgccgtgcagggtgacggataacggcaggcgcagctcgatttgcgcgccgggggccaggtcgttgatcggttgcagattgatctgcgcactgatcaccgcctccgggaaagtcttgatctcaaacaggtcattacgcatgcgctcgtcacgcagcgggatgccgctgttgatcgactccagctccacttccagctgcgccgcgccctggctgtcgaccttgccgtgcaacaccaggaagcgctggacttcagcaacctcggtgtttttggtggtgacgaacgacaggcgcgaggattcgttatccaggtaccagtcggcatgggcaggcacagcggcggcggccagcagcgcgaaggccaggggtttgacgttgaacataaagactcatgggcaaaaaacctgcccgaaccttaagcgcaatctcacgagcggcgcaaatccaatgtgggagctggctcccacaagagaagtgcgggatgtcaggggttgaggcggcagccttgtcggtcgcctaaccaacgcgccgtatgcgtacggcccaatccgctggcggtgacttcactgcgctccgggttatcgctgaacgcgctggtcggcacgtattgcttcacgtacccacggcaatagtcggcggggttgttctccacatagcggcacgagcaatactccttggccgtgtacgccgcaatgatgtcggggaaggcttgcaggttgacccgctcgtgccagatccaccccagcaaggcgaacaacagcagcagaaacagattggtaaacggtcgacgacgaatcatggttgcaccgccgcgagtacgcgcttgaggagttcgttgtggcggtaggtgccgtcacggtcgtcggcgtaacgcacgatcaccaggtgttcgtcgggcagcacaaacagcgcctggccccagtggccgagggcggcgaaggtgtcggcaggggcgtcgggccagggccgggcggcgccctgcacttcgcggttgagccaccattggccgccggcgacggcttcgtcctggccggcccggtatttatcgaagggccggcggttgaaggcgacccagtccttgggcaccaattgttgatcgccccagcgaccgtcccgtgccatcaacagcccgacgcgcgccaggtcgcgggcggtgaggtaggcgtaggacgaggcgacgaaggtttcgtcgccgtcggtttcccaggtggcgttatgaatgcccagcggcttgaacagcgcatcccacgggtagctcatataagccttgtggccaagcatgcctttgagggtggcggacaggatgttgctgtcgccactggaataacgaaaagcctggcccggtgcagcggcggcttctgtgtcggccgcgaagtcagccatatcgctgcggccacgggtatagagcatcgccaccaccgaggatttcagcggggcgtattcgtagtcttcctgccagtccagacccgaggcccagtgcagcaggtcggccatggtgactttggggtgctgtttcatcggcgggaagaagcgcgcggcggggtcggtgagtttgaagcggttttcgccgtaggccacgcccaataccgtcgccatgatgcttttgctgacagaccaggtgaggtgaggcgtggcggcggtggtaggcgcgccgtagcgttcatagatgatttgaccgtcgcggatcaccagcagcgcatcggtgcggatgccttggcgggtgtcgtcgtcacgcgtggggaatgcgtaagcgtccagggcatcgacggcggggcctgtgaggggggtgcctttggcccagtccttgtcgggccaggtttcggcttgggcggtaacggtgaccaacaacaaggcaacacacaacaggcctctgagcatggacgctgactcgatcaagggggcattcgtgcccgcgaggctagacgaggtgggtgacggttttgttacaggtttgtgtgtacgtgcccgttatccggctgatggcggataaccccgcagccaaaacccctgtcatccaaccgtcaccgtaacttcatggagctgacaccgagcctacatagcctgagtttggacaaacaagtcgaccggccggtaagtggccggcactcggagattcgccatgactcagatcgcccgcatcagcgacaccggcaatgaacgccgcctgcaagccgaacgcctggtcggcgcgaaggccttgcaagaagcccaggccctgcgtttcaacgttttcagtggcgagttcaacgccaagctgaagggcgcagaacacggcctggacatggatgattatgatgttcactgcagccacatcggcgtgcgggatatgaacagcggtcgactggtggccaccacccgtttgctggaccaccaggccgccagcaccctgggccggttctacagcgaagaagaattcagcctgcacggtttgctgcacttgcagggcccgatcctggaaatcggccgcacctgcgtcgacccggcttaccgcaacggcggcaccatcgccgtgttgtggggcgaactggccgaagtgctcaaccagggcggctacagctacctgatgggctgcgcgagcatcccgatgcacgacggcggcatccaggcccacgcgatcatgcagcgcctgcgcgagcgctacttgtgcaacgagcacctgcgcgccgaaccgaaaaagccgctgcccgcgctggacctgccgtccaacgtcatcgccgaaatgccgccactgctcaaggcctacatgcgcctgggcgcaaagatctgcggcgagccgtgctgggacgaagatttccaggtggccgacgtgttcatcctgctcaagcgcgatgagttgtgcccgcgttatgcccgccacttcaaggcggccatgtaatgagccgcctgcgcgtgtacgggcgcattgcccgcgtgctgctggtggtggcgctggggttgagcatggccagtgtgtttggtgtgttcgagcgtatgggcattgccaactcgatggtgcggcgccaacgctggtcgcgttttttcatggcgcggctgaccaacgccctgccctttcgcgtgacggtacatggtgaactgccgacgcagccgatgctgtgggtcagcaatcacgtgtcctggaccgatattccactgctgggcgccgtggcgccgatgtcgtttctgtccaaggccgaagtgcgcacctggccggtggccggctggttggcggccaaggcgggcagcctgtttattcgccgcggttcgggtgacagccaactgatccgcaagcaaatgactcgccatttggagcaacagcatccgctgctgatgttccccgaaggcaccaccaccgacgggcgcagcctgcgcaccttccacgggcgtttgctggccagcgcgattgatgccgatgtgtcgctgcaaccggtggcaatccgttatctgcgtgatgggcaagtcgacacgttggcaccgtttattggcgatgatgatttgctctcacacctgatgcgcctgtttggcaatgatcagggtgatgtggaaattcatgtgctcaagccgattgcctgtgccgggcaggaacgtgcagcgctggcgtttcaggcacagcaggccgtgcagaaagtgctgtttgggccggtgccggaagcagagcaggtagacgccagacctgcattcgctgcttaaaatgtgggagctggcttgcctgcgatagcggtgggtcagctacatttcgttcaactgacagactgctatcgcaggcaagccagctcccacattcagacctcagtggtcagttgtttgtgtgcaaaggcctgcaactcgggatagaaaatccgaaagtcttcactcaacggctcatacagctcgcgcaattcctgcatcgcaaaccccagttcctgcggctgtgtcagccgccgcgaaatcccgcgcagcacctgctccatcaccgcaaactcgcggtaagaccccagccagtcatccgccgccatccagggtgcaatctgcgccagccgccccggcagctgcggctcggccgccagcacgcggtacacctgcgacgtaaagcgctccagtggctggtcggcatacaacgcccagtcccgtgccaggcaatgatcgaaaaacacatcgagcacgatcccggcataacgcttgcgcgtcaggcgaaagcgcgacaacgcctcccccaccagcgggtggctgtcggtgaagcggtcgatcgaacgatgcagctggattgccgcctcgatttgcgggctgaactggccctgcaggcggcctttgacgaaatcgccatagaggctgcccagcagttgcgcaggaagttggccgcccaggtgcagatgtgcgagataattcatggcgcgcagtctaccactgccactcatgtatcgttataacccgatataccgattcgatctggtttaagaccaaaatcatattggtatatcgggatagaccgatttaaagttcgcctcatcgcgatataacgctttacgaaaccgagcaaccgccatgtccatcgacctcgacgaaataataaaagccctggcacacccagtacgacgagacatcctcacctggctgaaagatccgaaagtgcagttccccgaacaagtgcacaaccatgagtacggcatctgcgccgggcagatcgaccagcgctgcggtttgtcgcagtcgaccgtgtcggcccacctggccacgctgcaacgggcgggtttgatcagcagccagaaggccgggcagtggcactttttcaaacgcaacgaggacaccatccaggccttcctcgctgcgctcactatagaactcagcgctgccgacaacgcagcgttgtaacaaggaaaccataatgcccctctcgctactcatactggccctgagcgccttcgccatcggtaccaccgagttcgtcatcatgggcttgctgcccgatgtggcggcggacctcggcgtgtcgattcccggcgccggctggctggtcaccggctacgccctgggcgtggccatcggcgcgccgttcatggcactcgccaccgccaggctgccgcgcaaggccgctctggtagcgctgatgggcatcttcattatcggcaacctgctctgcgccctggccagtgactacaacgtgctgatgtttgctcgtgtggtcaccgcgctgtgccacggtgccttctttggtattggttcggtagtcgccgccaacctggtgccggccaacaaacgtgcgtcggccgtggccttgatgttcaccggcctgaccctggccaacgtgctcggtgtgccgctgggcaccgcgctgggccaacaggccggctggcgctcgaccttctgggctgtaacggtgattggcgtgatcgcgctgatcggcctgatccgcttcctgccggccaagcgagacgaagaaaaactcgacatgcgcgccgaactcaaagccctcaagggcgccggcatctggctgtcgctgaccatgaccgcactgttttccgcgtccatgttcaccctctttacttatgttgcgccgctgctgggcgatgtcaccggcgtgtcgcccagaggcgtgacctggactctgctgctgatcggcctgggcctcaccgtgggcaacatcatcggcggcaagctggcagacaaacgcctgtcggccaccctgatcggtgtgttcatcagcatggcggtggtgtccacggtgctgacctggaccagcgccgcgctgatcccgactgaaatcaccctgttcctgtgggccaccgccgcgtttgccgccgtgcctgcgctgcagatcaacgtggtgaccttcggcaaggcggcaccgaacctggtgtccaccctgaacatcggcgctttcaacatcggcaacgccctcggcgcctgggtcggcggcacggtgattgcccacggtttcggcctgaccagcgtgccgctggccgctgcggccctggcgatcctggccctgctggtgaccctgattactttccgtcagggcggcaatgccgacctggcccctgcgaccaactgatcaatccacttaaagagaagggtgttatcccatgacgactattttcgatccgatcacactgggcgacctggaattgtccaaccgcatcatcatggcgccgctgacccgctgccgcgccgatgaaggccgcgtgcccaacgcgctgatggccgaatactacgtacagcgtgcctccgccgggctgatcctcagcgaagccacttccgtaacgccgctgggcgtgggctacccggacaccccgggtatctggtccaacgaccaggtgcgcggctgggccaatgtcaccaaggccattcatggcgccggcggcaagatcttcctgcaactgtggcacgtgggccgtatttcccatgagtcctacctgaacggcgaaagcccggtggccccaagcgcgatccagcctaaaggccacgtcagcctggttcgcccactggccgactacccaaccccgcgcgcgctggaaaccgctgaaatcgccgacatcgtcgacgcttaccgcaccggcgccgagaacgccaaggccgcaggctttgacggcgtggaaatccatggcgccaacggctacctgctcgaccagttcctgcaaagcagcaccaacaagcgcaccgacaactatggtggttccctggaaaaccgtgcgcgcctgctgctggaagtgacggacgcagccattgaagtctggggcgcaggccgcgtgggtgtgcacctggcaccgcgcgccgactcccacgacatgggcgacgacaacctggcggaaaccttcacctacgtcgccagcgaactgggcaagcgcggcatcgccttcatttgctcgcgcgagaaagaagccagtgacagcctcggcccgcaactgaaaaaagccttcggcggcccgtacattgccaacgaacgcttcaccaaagacagcgccaatgcctggctggccgccggcaaagcagacgccgtggccttcggcgtaccgttcattgccaacccggaccttccggctcgcttgaaggccgatgcgccgctgaacgaaccgcacccggaaaccttctacggcaaaggcccagtcggttacatcgactacccgacgctggcgttgtaatcgtctgaaatgcaaaaagccccggttcgcaggaaccggggctttttattactcattggaaaacgccaaagctgtcatgtgcttgccgggcttgtgtgggagctggcttgcctgcgatggcgtcgctgcggtgtgactgaggcactgagttgcctgcatcgcaggcaagccagctcccacacaagcccagtctccataccggcctgacattttgggttttgggggcgggcgggaaacactccttcacagccttgcaacaatattgctacaaaatacttaggcggctacctatcaacccttcgccagcccgtatataaagtcaccccaccaataaggcaaagggacgattgactgtctctggactttactgttgacacaactggacgcaattacgcattttgtcttaattgcgcaggctggggctcaggcgcagcatgtccagccctgcatcaacccaacgttcggcgtcctgatgcagttggaaactgtcgggcaccagcagccattggcctatcaagccatggatgaaggcatggatgcacaccgcaccgcgcgtggtgtccaggttttccggaagttgcccgcgatggaccgcgttgcgcaatgtcaggccgatccgcaggttgcactcaaggctgtgagtctggcgttggcgccgcatgtcacacatttcatcggtgaactcgcacttatgaaacaggatttcgttgatgcgccgggttttcgggtcaagggccacttgatgataaagacgaatcaacagcttgcgcatacagcccagcgggtcgacttcatcctcgctttcactcgcccgcgccagctcatccagaggctcgtgcagggtgtcgagcagcgcctgcagcaggtcggacttgttgctgaagtgccaatagatggcaccccgcgtcacgccggccagggtggcgatgtccgccagcgtggtgcgcgcgacaccgcgctgatagaaggcttgctcggcggcatcgagaatctggctgcgcgtttcctgagcttcctctttggtgcgacgaaccatggcagtaaaacctcaatcgggacactgtggatggtgcttgaccatcatctgaataattgtgggacgacaccgtcatgggcgccgaacgtactaaaatcgaggcttcgggggttgctttgtcaacattccgcgctgcctgtcaagagtttacaaacaaccatgaacgtaagtatattgcgtagcaagctacttatctactcacagcttgttttttacccttccacacttcttgtgcgcactttgcgcgcctgacccgaggatcttcatgcaacttaagccagctgttaccgctctggtcactgccgtcgccctggcatcgctgctcagcggatgtaaaaaggaagaagcggctccgcccgctcaaacccctcaggtcggcgtggtcaccattcaaccgcaagcctttaccctgacctccgaactgccgggccgcaccacggcttaccgcatcgcggaagttcgccctcaggtcaacggcatcattctcaagcgcctgttcaaggaaggcgccgacgtgaaggaagggcaacagctctaccagatcgacccgtcggtgtatgacgccaccctgaaaagcgcgcaggcgagcctgacccagaccaagtccatcaccgaccgctacaagcagttggtcgatgagcaggccgtcagccgccaggaatacgacaccgccgtcgccaaccgcatgaccgccgaagcaaacgttcaaaccgcccagatcaacgtgcgctacaccaaagtgttcgcgccgatctccgggcgtatcggccgttcttcggtgaccgaaggcgcgctggtcagcaatggccagaccgatgccatggccgtgatccagcaactggacccgatctatgtcgacgtcacgcagtcttcggctgagatgctgaaactgcgccgcgacctggaaagtggccagctgcaaaaagccggcgacaacgccgccaaggtcaagctgaccctggaagacggcagttcttacggccaggacggcaagctggaattctccgaagtgtcggtcgaccagaccaccggttccgtgaccctgcgcgccgtgttccccaaccctgaccacaccctgctgccgggcatgttcgtgcacgcccagctgcaagccggcgtgaacagcaaggccatcctggcacctcagcaaggcgtgacccgcgacctcaaaggcatcccgactgcgctgatcgtgaacaaggacaacaaggtcgagcaacgcgtattggtcgccaaccgtactgccggtgcctactggctggtggagaaagggctggacgccggtgaccgcgtgattaccgaaggcctgcaattcatcaagccgggcatcgaggtcaaggtcaaggacgctgacaacgccaaacccgccggaagtgccgcagcgcctgctgccgctgctggtaaaggggagtaatccatgtccaaattttttatcgaccgtcccatttttgcctgggtaattgccctggtgatcatgctggtcggggcactgtcgatcctgaagttgcccatcaaccaatacccggccatcgcgccgaccgccatcgatatccaggtgacctacccgggcgcgtctgcacaaaccgtgcaggacaccgtggtgcaggtgatcgaacagcagctcaacggtatcgacaacctgcgttacgtggcctcggacagtaactccgacggcagcatgaccatcaccgcgacgttcaaccaaggtaccaacccggatatcgcccaggtacaggtgcagaacaagctgaacctggcgaccccgctgctgccgcaagaagtgcagcaacagggtatccgcgtgaccaagtcggtgaagaacttcctgatggtgatcgggctggtgtcggaagacggcagcatgaccaaggacgacctgtccaactacatcgtgtccaacattcaggacccgatctcgcgtaccgcgggtgtaggtgacttccaggtcttcggttcgcaatacgccatgcgtatctggctcgacccggccaagttgaacaacttccagctcacgccggtggatgtcagcagcgcgattcaggcacagaacgttcaggtagcaaccggtcaactcggtggcctgccggccctgcccggcacccagctgaacgccaccatcatcggcaagacgcgtctgcaatcggctgaagagttcggcaaaatcctgatgaaggtcaatgccgacggctcgcaagtacgcctgcgtgacgttgcccgcattgaactgggcggccagaactacagcatcagtgcgcagttcaacggcaagccggcctccggcatggccatcaagctggcagccggggccaacgccctggacaccggcaaggccatccgtgccaccgtggcgtccctggaaccgttcttcccgccaggcatgaaggcggtggtgccctatgacaccaccccagtggtgaccgagtcgatctccggtgttgttgacaccctggtcgaagcgatcgtgctggtgttcctggtgatgttcctgttcctgcagaacttccgcgccaccatcatcaccaccatgaccgtaccggtggtattgctgggtaccttcgggatcctggcggcagcgggcttcaccatcaacaccctgaccatgttcggcatgatcctggccatcggcttgctggtggacgacgccatcgtcgtggtggaaaacgtcgaacgggtaatggccgaggaacatctgtcgcccaaagaggcgacgatcaagtccatgggtcagatccagggcgccctggtgggtattgccctggtgctgtcggcggtactgttgccgatggcgttcttcggtggttccacgggtgtgatctaccggcagttctccatcacgattgtgtcggcgatggccttgtcggtactggtcgccctgatcttcaccccggccttgtgcgccaccatgctcaagccgatcgaccccgagaaacacggccaacccaagcgtggtttctttggctggttcaaccgcaccttcgacagcggcgtactcaagtacgagcgcggcgtgggcggcatgatcaagcacaagattccagcgttcctggtttatatcctgatcttcgccggcatgatctggatgttcacacgtattccaagcgcgttcctccccgaggaagaccagggtgtgatcttcgcccaggtgcagacgccggtcggttcgtcggctgaacgtacgcagaaagtcatcgacgacatgcgtgccttcctgctgcacgacaaggaaggcgagccaggtgaaggcaaggccgtgaaatcggtatttaccgtaaacggcttcaacttcgcaggtcgtggtcagagttcgggccttgcattcgtgatgctcaaaccgtggggcgagcgtgattcgacccagtcggtgtttgaggtggccaagcgtgcccagggttacttcttcggagccttcaaggacgccatggtatttgccatcgtgccaccttcggttctggaactgggtaacgccaccggtttcgacgtgttcctgcaagaccagggtggcgttggccacgacaagctgatggcggcccgtaaccagttcctgggtgcggcggcacaaagcaagatcctggcgggcgtacgtcctaacggcgtgaacgatgaaccccagtacgaactgaccgtcgacgacgagaaagccagtgctcagggcatcagcctcgcggatatccagcagaccctggcgattgccttgggtggcagctacatcaacgacttcatcgaccgtggccgtgtgaagaaggtgtatgtacagggtgacgcagccagccggatgtcgccggaagacttggacaagtggtacgtgcgcagcaatgacgggaagatggtgccgttgtcggcgatctcgtcgggcaagtggatctacggttcgcccaagctctcgcgttataacggtgtagcggcgatggaaatcctcggtaccccggcacctggctacagtaccggtgacgcaatggcggaagtcgagcgcattgccaaagacttgccggcaggtgttggttactcgtggaccggtctgtcgtacgaagaacgtctgtccggctcccaggcaccggcgctgtatgccttgtcgctgctggtcgtgttcttgtgcctcgcggccctgtacgaaagctggtcgatcccgattgcagtcgtcctggtggtgccgttgggtgtgatcggtgcactgatcgccaccagcctgcgcgggctgtccaacgacgtgttcttccaggtgggcttgctggtaacggtgggtctggcggcgaaaaacgccatcctgatcgtggagttcgccaaagagctgcatgagcagggcaaaggcatcgtcgaggcggctatcgaagcgtcccgcatgcgtctgcgcccgatcatcatgacgtccatggcgttcatgctcggcgtattgccactggcgatttccaccggtgccggttcaggcagccagcacgccatcggtaccggcgtaattggcggtatgatcacggccactgtgctggcgatcttctgggtgccactgttctatgcaaccgtgtcctcggccggcgaacgtaaaaagaaagacactactgaaactcctaaagaggctggccaatgagcaagtcgctactttccttagccgtcacggcattcgtgctcagtggctgctcgctgatacctgactatcagcgccccgaagcgccggtggccgcacagttcccgcaggggccggcgtattcgtcggcccaggcgccgggccaggccgctgccgagcagggctggaagcagtttttccatgatcctgccctgcaacagctgatccagaccgcactggtgaacaaccgtgacctgcgtgtcgcggccctgaacatcgacgcttacgccgcgcagtaccagatccagcgggccgacctgttcccggccgtctcggccacgggcagcggcagccgttcgcgtaccccggccaagctgtcgcagaccggcgaagccaacatcagcagccagtactcggccggcctggggatcagctcgtatgagctggacctgttcggtcgcgtgcgcagcttgagcgaagaagccctgcaaaagtacttcgccactgaagaagcacggcgcagcacccagatcagcctggtggccagcgtggcgaatgcctacctgacctggcaggccgacaaggaactgctcaagctgacccaggacaccctcggcgcgttcgagcaaagctacaaactgacctcgcgcagcaacgaagtcggcgtggcctcggccctcgacctcagccaggcacgtacgtcggtggaaaacgcccgcgttcagcttgcccggtatacacgccaggtagcccaggacgaaaacagcctgaccctgctgctgggcaccggcctgccggccaacatcgccagcaaaccgctctcggatgacctgctcagcgaagtcccggccgggttgccatcggacctgctgcaacgtcgccctgacatcgtgcaggccgagtacaacctgaaagcggccaacgccaatatcggcgcggcccgtgcagcgttcttcccgagcatcagcctgaccgccagcgccggtaccgccagcccgaccctgggcggcctgttcaaaggcggttcgggtacctggtcgtttgccccgcagatcaacatcccgatcttcaacgccggtagcctgcgcgcaagcctggactactcgaagatccagaaagagatcaacgtggccaactacgagaaggcgattcagaccggcttccaggaagtgtccgacggcctcgccgcgcgtgagacctacaagcagcaactggacgcccaacgtggcttcgtcgcggccaaccaggattactaccgcctggccgagcgtcgctaccgcattggtgtcgacagcaacctgaccttcctcgacgcccagcgccaactgttcagtgcccagcaatcgctgatcaccgaccgcctggcgcagctcaacagcgaggtcaacctgtacaaggccctcggcggtggctggaacgagcagaccgcgaagaacgagccgctgaaagaacaggctccgccgctgaagttgttctgatagcagcgttgtagacaaaaccgcttccctcaccggaagcggtttttttatgcccgggccatgccaatgacacacgctgtaacttgcgttcgatcatcgcccacaacccgctctcccccactttcatcgcccccgcaccgccacgcaccatggccggcacctgcataaccccaataacaacaggtccctcgccatgagcactttgcacccgcgccagctgttgctggcaaccgctgtcgtcagccttgccctgcccgtcgtcgccgaagagcacggctttctcgaagacgccagcgccaacctcaacctgcgcaacttcttcttcaaccgcaactacaccaacccgaccaaagcccagggcggcgcacaggagtggacgcaaagtttcattctcgacgccaaatccggcttcacccagggcacggtggggttcggcatggacgtgttgggtctgtactcgcagaaactcgacgggggacgcggcaccggtggcacccaactgctgccgctggaccacgacggccgcccggcggacaatttcgggcgcctcggcgtggcgttcaaagcgcgaatgtcgaagactgaactgaaggtcggcgagtggatgccggtgctgccgatcctgcgctcagacgacggccgctcgctgccgcaaaccctgcgcggcgggcaaatcacctcaaaggaaatcgacggcctgaccctttacggcggccagttccgcgccaacagcccgcgtgacgacagcagcatgacggatatgtcgatgttcgggaaaaccgccttcacttccgaccgcttcaacttccagggcggcgagtatgcgttcaacgacaaacgcacccagatcggcctgtggaatgcccagctcaaggacatctaccgccagcagttcgtcaacctgatccacagccaaccgctgggcgactggaccctgggcgccaacctcgggttcttttacggcaaggacgacggcagcgcccgcgcaggtgacctcgacaacaagacctggtccggcctgttctccgcccgttacggtggcaacaccttctacgtcggcctgcaaaaactcaccggcaacagtgcgtggatgcgcgtcaacggcaccagcggcggcaccctggccaacgacagttacaacgccagctatgacaacgcccaggaaaaatcctggcaagtgcgccacgacttcaacttcgtggtcctcggcgtcccgggcctgaccttgatgaaccgctacatcagcggcagcaacgtacacaccggcaccatcaccgacggcaaggaatggggccgcgaaagtgaactgggctacaccgtgcaaagcggtaccctgaaaaatctcaacctgcgctggcgcaattccagcatgcgccgcgactacagcaacaatgagttcgacgagaaccggttgatcgtcagctatcccgtcagcctcttgtaagcggcccgttcaccccacgtgccagccgcgcgtagcctgtacgcggctggccccgtagtaaattgcttcaaacgaaacaggaaccgtgcctgtcactcgctcgactgatggagaccagcgccaacgctgaatctgaagtctccgacaggaaaggtaacctcccaatgagttcgatcccctcaagtcaaccccccttcatcgcgccccctgcccctaacaacccactgcccccgcccgtcaaagcacctgccattcaccgcgaaaaacagcagctggtggatgacggcaccttgagtgccagccgcctgctgatccgggataacagcaaccccgggaaccccaaactgctggaggaagtgtttaccctcgaaaccggtgacgcctcagacttaatccatatcagccaacgtcccgacggccaactgcacgtccaggtaaacggccgcgactatgcctttgatacaagcaagggccatccaaccctccagcatttcctctacatcaaaaccaatggcggggatgaccgcattaccatcgcccccaatgtgacgttcaaggtagagatcagggccggggatggcgacgacacggtccaggcgggaagcggtgaaacccgggtctacggcgggcgcggcaatgaccagatccgtcttggcagcggaacaggctatgcagaaggcaatgagggcgacgatacgataatgggggggaccggccacgcggtcatgtacggtaacggtggtcacgatcgactgtatgcaggcagcggaccattcaccaaacacaaccacctggatggcggtacaggcgacgaccagctatacgcaggcaatggctattcggtactcaatggcggtccgggtaacgacctattggtcggccatgaccacaccgccttttacaccggcgaggggcgtaacacggtatgggccaattccatcaaggcccgtatctacgcacaagcgacggatcgcctgatcggcgcccaaaactcaagcgtcacttacgtgaaaccctccgaggccggtcgacaagccttcagcatcgaagggccagccgatttccttcaacgggtcgaagacgatctggcactgcttcgcacatcgcctcaagggcaaaaaatgctggaggccctggacaaggcagcgatgcaaaacgcaggccctgtgaaaattgtgccgtccaaagggcatggtgacgcctacgacttctggagcacggcgctgcaaaaactggaagacgctcatcagcttgtgtatgttccggatgcccccagggacggctacatcaaagacggggtggccggtgcgcgcgcggacaaagcgacgattttctacgacccggcagacatccacgaagacggtgacgtgctcttgccactgctgctgctttaccatgagatggcgcacgcctggaacggcgccaacggtaccttccttccaggttcgagcgatccgacccaggatcatcccgagcgatccggcccgcccaacgcagaactgcaagccgtcggcctggcgaccaacgcaccgcccttcgattttgataacgacccctccacgccccccacctcaaccaaccctgccccctttaccgagaattcgctgaaccaggaaatgggcaagccattgcgccaacgctacgcctgacaaaggaggccacaaccacggcacaccgtccttaagatcagcggcactatttatcggtgatgacgggcgtgatcatgctgtatcgtgctcgcgcccattacccggcacagggagttcatcaacacggatcaacccctcattatccaggccgccatgaaatacctccttgtcattctgtcgattctgctcagcggctgtatcggcgcgcccatcgccctgacgccgcagaccgagcagcgtttgcaggcccaggcccccatccgcttcctgctgaccttcgatgacggccccagcgcttcgggctacaacaacccgagccgttcggtggcggcggacctggcgaacaacccgatactgccgggcatcaaggcggtgtttttcctgcagaccgaagcgtcccgctccggcggcagccgccgtggccacaagaccatggaacgcgagttcgcggccggccatatcctggccttccatacggccacggcgtttcataccaaccatcgttggttgagtgacgcagaactggaaagcaccctcacccggggcacggccgatattgcctcaatcaccggcagcccgccggcgctggtacgcccgcccttctggaactatgacaagcgtacgtttgccgcctacacccgccatggcctgcacgttttgctgaccgacctgagtgccaatgacggcaagatctggggcttcaacggcagcccgcgccgccgcgccaacctgtaccggcaactgtcggtgctgcgtgaacacattgccttgggcgaactgccgacagtggatggggtgatcccggtggtggtgaccttccacgatatcaaccgctacaccgcgcggcatatgcaggaatacctgcaaatcctgatggacagcgcccggatcaacggcatgaaaaccgctgccgaaccgttctacaccgacactgccacactggaacgcgcggcgctggcgcgtacggtgaaggatgtgaatgaaccggtgcatttgccgggggtatggaattgggtatgggatgcggattcccattgatcctcttgcaataaggatctctgtggaggccggtttgtgtgggagctggcttgtgtgggacttgccttgtgtgggagctggcttgcctgcgatagcgtcacctcggtgcatctgttgaactgaggcgcctgcatcgcgggcaagcccggctcccacacaagccagttcccacagttgatggcatttcacatttagctttcttggcgcgactcaacccccagctcgtcccacaccgactccgccaggtgaaacgtcgcattcgccgcaggaatcccgcagtagatcgcactctgcatcagcacctccttgatctcagcgcgggttacgccgttgctggcggcggcgcgcaggtgcagcttgagttcttcgctgcggttcatgccgatcagcatggcgatggtgatcaggctgcgggtgtgccgcggcaaaccggggcgggtccagatatcaccccaggcgtggcgggtgatcatttcctgaaactcgctattgaactcggtcaaggcgttgaggctgcggtcgacatgggcgtcgcccagtacttcacggcggacttgcaggccgtcggcgtaacgttgtttttcgtccacaaaaagctcctcagcgggccagcaaaaattcaatcacccggtcgctgaactcagcgccggcctgaacgttggacaggtgcgccgcgtaaaactcggcgtattcggcgccctgtacatgggcctggatgaagtggctgccggccggtggcgtgaccgcgtcttcactgccggcgaccaccagggtcggtaccttgatcgcagccagttgttcacgaaaatccgcatcgcgcacggccccgcagttggcggcgtagccttcaggcgaggtggcggcaagcatgtcggtgatcagcttggcctgatcgggatgagcctcggcaaagtcggccgtgaaccaacgcgcaatcgatgcatcgcgcaacgcaaccatggccgccgcgccatcgcgcaagaccatttcaatgcgcgggttccacacctcgggcgtgccgatcttggcggcggtgttgcacaccaccaagcgctgcaggcgctcaccggcattaatgcccaaccactggccgatcaagccgcccatggacagcccgcagaaatgtgcacgctggatatccaaagcatccagcagcgcgatcacgtcacaccccagttgctcaatgctgtaggggccggcggtaaccagggatcggccatggccacgggtatcgaaacgcagcacgcgaaaatgctcggtaaaggccggcatctggaaatcccacatgtgcaggtcggtgcccaatgagttggacaataccaacaccggcgccccgagcgggccgtcgagctgataatgcagttcgccctcggcgagttgtacaaaggccacagcggtctccttacgcggtcaatgcaaaatgttcggttacagcgcggctgacccaggtgtgggcctgacccaggtagtgggctggatcgagcaggcggtccagttcagccgctgacagctcggcactgacttggggttcatccgccaataccgcacgcaaatggcggccctgcgcgaccgcctgtttgcagcactgctccagcagatggtgcgccgtctcacggcccaaacgttgggccagcacgctactgacggcttcggccaacaccaggccctgggtcagatcgaggttttgcgccatgcgctcagcgtcgacttccagcccctcgcctatcagcagcgcctgcttcaaggcacccgataccagcaggcaaatctgcggcaaggtttcccactcggcatgccacaagcccaggctgcgttcgtgttcctggggcatggcgctgaacatcgtcgccaccaggcccggcacgcgggtggcggcactgatcagcacagcagcgcccaccgggttgcgtttgtgcggcatggtcgatgagccccctttgcccggcgccgagggttcgaagacttctgcggcttcagtctgcatcagcaggctgatatcgcggccgagtttgccgaggctgccggcgatcaagccaagcgaactggcaaactccaccaagcggtcgcgctgggtgtgccagggttgctcgggcaagcccagttgcagctccgccgccaacgcctcggccaccggcagagcgtgctcgccaagcgccgcgagggtgccggaggcgccgccaaattgcagcaccagcaagcgtggtttcaattcggccagccgttggcggctgcgcgtcaccgcccccagccagccggcgattttcatccccagggtgaccggcgtcgcgtgttgcagccaggtgcgcccggccaacggcacgcccgcataacgctgcgcttgcgccgccagaatctcacccagctgcgccaggtccgcctcgaccaaagccacagcgcggcgcagttgcagcaccagcccggtgtccatcacatcctggctggtcgcccccaagtgcacataacgttcggcgccggcatcttcagcggcaatcaacttgcccaatgccttcaccaaggggatcgccgaattccccgccgtggcaatcgccaagccgagggcatccacgtcgtacagtgaagccaggcaagcctgtgcaatcggcgcgacagccgcctgggggatcagcccgacccgggcctgcgcccgggccagaccggcttcgaaatccagcatgccctgcaggcgcccttgatcgcagaacacctcggccatgctgtcagcggtgaagtaagcgtcgaacagttgcgtgctcgtgcgcagtgtcataactcatccctagaggtcatggtgcaaatacgccgcctgtttcggcaggcgcaagctgaagaggaaggcaatcgccatcatcgcggtgacgtaccagtagaaggtgttttccataccgatggatttcaggctcagcgcgacgacttccgccgaaccgccaaaaatcgcattcgccaccgcatacgccaggcccacgcccaaggcacgcacttgcggcgggaacatttccgctttcaccaggccgctgatggaggtgtagaaactcacaatcgccaacgccagggtgatcagcacaaaggccaggaacgggctgctgacggttttcagggtgagcaggatcggcacggtaaacaaggtgcccaggcctgcgaaccacagcatggaattacgtcgcccgatcttgtccgccagcatgccgaacaacggttgcatgcacatgtagagaaacagcgcgccggtcatgatgtagctcgacgtcttggcgtgcatgcccacggtgttcaccagatatttctgcatgtacgtggtgaaggtgtagaaaatcagcgagccgccggcggtgtagcccagcacggtgataaaggccccggtatggttgcgaaacagcgcggcaatgctgccggcgtctttgtcttcacgcatttccttactggtggtttctttgagcgtgcggcgcagcagcagggagatcaccgccgcgatcgcaccgatcacgaatggaatccgccagccccaggcgcgcagttcgtcctcactgagaaactgttgcaggatcaccaccaccagcaccgcgagcaattgcccgccaatcagcgtcacgtattggaacgaggcgaaaaagccgcgctggcccttgagtgcgacttcactcatgtaagtcgctgtggtgccatattcaccgcctaccgacaaaccctggaacagccgcgcgatcagcaggaaaatcggcgcccagataccgatgtctttgtaggtcggcaaaaacgcgataaccagagacccggcgcacatcatcagcaccgagatcatcattgagttcttgcggccgtgcttgtcagccacgcggccaaacagccagccgccaataggccgcatcaggaatccggcggcaaatacaccggcggtgttgaccagttgcaccgtggggttgtccgacgggaaaaacgccggggcaaagtaaatggcgcagaaggcgtagacgtagaagtcgaaccattcgacgaggttgccggaggacgccccgacaatcgcaaaaatccgtttgctgcgttcttctccggtgtagtgattcgttgttgttgtcatgttttttcactcagtgggaacggttatagcctagacatactttgcaacaaccatgttccgcaagcagacttttggttaagtgttgctttggaggacgctatcgcaggcaagccagctcccacctttgaaagtattcacaaatcaaaatgtgggagctggcttgcctgcgatggggccctcaagacctgctcaataatcgaagaacaccgtttccctgtccgtgccctgcaaaatcacattccactgatgcacaccttgcgcatcaggttttgcaatcaacgtatcgcgacgctcggcaggcacgcaggccagcaacgggtcatccccgttcagcgcctccccctcaaaataaatccgcgtcagcaaatgcttcaccaggccacgggcaaacaccaacaccaccagatgcggcgcctgcgtcgtgcccttcaaccccggcacggcgcccggtttgatggtggtgaaacgaaaccgcccttcggcatccaccggcacccggccaaagccttcaaagttcggatcgacggctttgtcctgctcatcttcaggatggtcgtacttgccggcggcattggcctgccagacttccagcatggcgtcgttgacgacatcgccgttaccgtccaccacttgcccgctgatcgccacacgctcgccgagcgtggcgggtacggtcaggtcttcacggttcagccaggtcaggccgatgtggtaatacggcccgacggtgtgggacgtggtcgcagtgagtgtcatctcatttctccatcggcgtggcgtcgcggccgcgcaggacgatgtcccagcggtagccgagggcataggaaggaatggttttttccaggtcaaaactcgcgatcaggcgctgcttggccgaggtgtcgggcacgcagttgtagatcgggtcgtattccagcagcgggtcgccagggaaatacatctgcgtgaccagccgcgtcagcacgctggggccaaacagcgaaaagtggatatgcgccgggcgccacgcgttgtggtggttgccccatgggtaggcgccgggcttgatggtctggaactggtaccagccgtcggcatcggtgacggtgcggccggtgccggtgaaattcgggtccagcggtgcgtcatgcaggtcacgcttgtggttgtaacggccggcggcgttggcctgccagatttccacgaggatgcccggcaccggcaggccgttttcgtccagcacacggccgtgaatgatgatgcgttcgccctggggctcgccttcatgctgagccgtcaggtcattgtccttctcgtctactcgctcggcgccaatggtcgggccggtaatttccgacaaggaatggggcagaaacaccaacggctgggacggcgaacgcaggttcgtcgactggtaggccgggtgcaggtaatcaggttgagtgcccgcttgcgggcgccggtaaccgggcttgtcactcatggtgcagtcctcttttattaaacgcgttcaatcgccagggccaggccttggccgacgcccacacacatagtcgccaggcctttgcggccgccggttttttccagctggtgcagcgcggtcagtaccagccgcgcgccgctcatgcccaagggatggcccaaggcaatggcgccgccgttcgggttgacctgaggcgcatcgtcggcgatgcccagttcacgcaacaccgccaggccttggctggcaaaggcttcgttaagctcgatgacgtcaaagtccgtcaccgccaggcccagccgctcaaccagcttgcgtaccgccggcaccgggccgatgcccatcactcgcggtgcgacaccagcgctggccatgcccaatacccgcgcgcgcgccgtcagcccgtgttttttcacggcttcggcagacgccaggatcagcgccgccgcaccgtcattcacgcccgaggcattgccggcggtcacggtcttgtccgggccgttgaccggtttgagtttggccagggcttcaagcgtggtgtcccgtgggtgttcatcgtgttccaccacggtttcgccctttttatgggcgacgcgtaccggcacgatttcttcggcgaagaaaccggcggcttgcgcggcggcggtacgttgctgactgcgcaacgcgaaagcgtcctggtcggcgcgggacacgctgtaatcatcggccacgttatcggcggtctgtggcatcgcatccacgccgtactgggccttcatcagcgggttgataaagcgccagccgatggtggtgtcttccagcttcatagtgcgcgagaacgccgcgtcggccttgcccatcacaaacggcgcgcgggacatcgactccacgccgccggcaatcgccagctccatttcaccgctggcgatggcccgaaaagcggtgccgatggcatccatacccgaagcgcagaggcggttgagggtcacgcctggaatgctgtccggcagaccggccagcagcaacgccatgcgggcgacgttgcggttgtcttcaccggcctggttggcgcagccgaggaagacttcgtccacggcgctccagtccaccgacgggttacgttcgatcaaggccttgatcggcagtgaagccagatcatcggcgcgcacggcggacaacccgccgccaaaacgaccaatgggagtgcgaatggcatcgcagataaacacgtcgcgcatcaggcttctcccggtgcttggccgtgggcagcggcagtacgtgcttccaaatcacgcagggccgtcaactcgacctcggtaggctcggcggtggtgctgacctgatcggcaaagcgaatcgcccaaccggtggccgcgaccacttgctcacgggtcacgccggggtgcagcgcagtgaccacgaattcatgggtgccctcttccggctccatggtgcacaggtcggtaataatccctacgggcccggcgcctggcaggccgaggcgcttgcgtgaatcaccgccctcgccgtgacccaccgaggtgatgaaatccagtttgtcgacaaacgaacgcgccgattgcttgaggatgatcagcacgcttttggcggaacctgcaatttccggcgcaccaccggcacccggcaggcgtactttgggttggtggtaatcaccgaccacggttgtattgatattgccgaagcggtcgacttgggcagcgccgagaaagccgacgtcgatacgcccgccttgcagccagtaacggaagatttcgccggtcggcacgacggtgtcggcagtttccgccagctcgccgtcaccaatcgacaacggtaaaaccgatggcttggcaccaatcgggccggactcatagatcagcaccacgtcgggcgatgaggtcaggcgtgccaggttggcggccttggacggcaagccgatgccgacaaagcagacagagccgttcttgaggcggcgcgcggcggcgacggtcatcatttcattggtcgagtaagccattactgggcctcctgcgcggcggccagcttggcctggaattcactgaagtcggcggtgccgtggatgtattcatcgatccaggcggtaaaggtcccacggtcgcgggcgatcgggtcccacgcctggtagaagcggttgtcgcgttcgttgtagccgtgggcgtaggacgggtgcgcaccaccgggaacatggcagacagccgtcagcgcccaggtcggcagaacgcaactgttcatcggcgcgttcaggtcgtcgacgatttcttcgacggtgacgatgcagcgtttggccgccagcgccgcttctttctgcacgccgagaatgccccagagcaacacattgcccttgcgatcagccttctgcgcgtggatcacggtgacatccgggcgcaccgagggcactgccgccagcacttcgccggtgaaggggcacgtcaccgtcttgatcagcgggttgaccttgggcaggtcggaaccggcgtaggcacgcagcaccgcgaacggcaggcccgatgcaccggcaacgtaggcattggccaggtcggcgtggctgtgttcttcgatttccagcggttgcggccattgcttctcgaccgcgtcacgcaggcgatgcagggagcccacgcccgggttgccgccccaggagaaaatcaacttgcgggcgcagccggcgccgatcaactggtcgtagatcaggtcaggcgtcatacgcaccagcgtcaggtctttcttgccctgacgaatgatttcatgacccgctgccgtagggatcaggtgggtgaagccttccagtgcgacggtatcgccgtcgttcacgaatcgcttcaccgcgtcgcgcagcgcaagaatttcagccatggggttcgggctcccggtatggatcgaaaaaggcgctgaagtggcgccgaagtgcttgaaggttaagccggggaaatgagccaaacaatccgataatcgactcagtgttcgattatcgaacgaattgttgcctggctaatgacttggagagacacggtcaatgtgggagctggcttgcctgcgatggcgccggtgaattcaccaccgcaatcgcaggcaagccagctcccacaaaagccactgcaaccccaatctcaggtcgcgtccgcatggctgaccaggcctttgatcaccacggctgcagtggccaaagcggccggaaccaccagcgcagtcagcacttgctcgaagttccaaccaaggccgagcaaggtggcgcccatccaggccccgaggatcgcaccgaagcgaccgatgcccagcatccacgacacgccggtggcgcggccctgggtcgggtaaaagcgcgcggccagcgatggcatcgccgattgcgcgccgttgacgcacatcccggcaaccaataccaaggtcgccagcaaggtgatattgcccaggctctgccccaccgcgtaggcaaacactccggccagcaggtagaaagtgccgatgaccttgtgggggttgaaccggtccatggcccagcccacgccgactgcgctgagcacaccgccaaactggaacaacgcaccgataaatgctgcctgctccatgctggcgccgctgtcgcgcatcaaggttggcagccaactggtgagcaggtacacgatcaccaggcccatgaagtaggtgagccatagcagcaaggtgccggcgctgtaggtgccggagaagatcaccgcgaatacattgcgcgccttgacggttttttgctcgggcacactgaaactggtggcctgggcgacaaggttgggctcaatgggtgacaaggttttgcgcaccttgtcggtcccgcgattacgcaccaccaggtagcgtgccgactccggcagccagaacaccagcaccaccgccagaaccaacggcagaatgccgccgatcatcaacagcgcgtgccagccgaacgccgggatcagcttggccgagataaagccgccgcccgccatgccgaggttgaagccgcagaacatgctggtcaccagcagcgacttgtggcgctcgggtgtgtattcggacagcagcgtggtggcattcggcatccccgcgcccaggcccagcccggtgaggaagcgcagtaccagcaattggtcgacgttagcgctgtaagccgacgccaggctaaacgcgccgaataccagtaccgcgccgacgagcaccactttgcggccaaagcggtcggccagcgggcccgagcccagtgcgccgaacaccatgccgatcagcgcggcactcattaccggcccaaggctagcacggtcgatgccccaatcctgggacagcgccggcgcgatgaagcccatggccgccgtgtcgaggccatcgagaaaaacaatcaggaaacacaggatcaccacacgccattggtagcgtgacaagggctgggtgttgataaaggactgcacgtccaggttcgtaccgagagaaggctgattcattattcttatttccacaccgatgggcgggctgacgacctgtggccgtcgttattattgggcgcttgcagagcgctgccgcacattaataagcctggggaaacaccgtcaattcatcaaaccgggatctgtgcggtcaccgaacacttaggcaaacagctgtgcactcagctcgcggctggcactgagcatgctcggcaggaaacgttgctccagttcgctgcggctgacccggccggcatgggtactgacattgagcgcagccagcacctggccggacgcgtcgtacacgggcacggcaatggaacgcaggccctgttccagttcctgatccacgatgcaccagccctgctggcgaacctgttgcaggcactccagcaacgactccggtgtggtcagggttcggctggtcttggtctgaaggtcggcgtggtcgaggtagtccttgagggatgcatcatccagcgccgccagcaggatccggcccatggacgtgcagtacgccggcaaacgcccgcccaccgacagatcgacggagatcagccgctgagtcgtggcggagcgggcgatataaagaatgtcgtcgccctccagagtggccatgttgcaggcttcgtggagctgctcgctcatgcggtccagatagggctgggccgatactgccagcggtgtggatgacaaataggcatggcccagggtcaggactttgggcagcagcgaataggtacgcccgtcggtggtggcgtagccgagcttgatcagggtgtgcaggcaacgccgtacagccgcgcggggaatctccgtgcggtggctgatctgggcgatggtcaggtggcgcttgcgctcctggaatgcctgcaccactgccaggccgcgggccagggaggtcatgaagtccggatcgccggtaaacgcctggatgcgcttggcgggtgaagccacgatcggcggcgccactgacgcgaaggagttgcgcaattgatcgttcatttcaagggtcctttctcttgttttcaaccactgggagggttggctgctattacaagccgcacccgtcgggatgcacaagacagcctcggcaacattgggcgattatcggacggtcattcgattatcgcaattttgcgggctgtcaggccgcagccgtcatatttcctggctctcacacaattagttagaagagtgcacagttttatgatgcgtgtgtttcacacattctgacgacgctatgtaacaaacccctcacaaagcgttcacgctttttaacttcagggtgatagtgttattcaaacgcgccgctataatgcaccttgtgcagaggtcggcccggtagtcatatcagggcaggagctcacccggtgttgcaggttgcagcaccgcaggtcacaagtagatgcttaaaagaaatgcccttcggcccgtcttttcaaacttgaacggttgcagtgtccaacttgaaataacccgagggtatctttcaggcagcgtgctgcacactaaatacacttaactcaattaggtaacactgtgacgaaagacgaactgcgcgcggaacttgagcgccaggagcaacgttacaaggacgtttacggcggggaagtcaccacctacgccgcccagccagagccggagcgcaaaccatggcgcaaacgagcgagcttgctggatcaggcctttgcccaggaaatccaaaagattgaacaggaactcaaagccgaagagccataagcacttcgggttgagctatcaggtttagccaccgccgctggcgcattgccagtggtgggcaagctcgctttggttacgcggccgaccgcctgcagcgaaatttcgtacaaatgtttcagacatgacgtttggatgacaaaaccccgtcattttgaccccgcgctttataaatcaaagacttgccaaagccccgaaaaccctgggatgcgcctgcctgcaccatggtttttcagtgaagattgttaccgatgagcagctagtgcatcgattactgaggttttctggcataatcgcgcccccttacgaccgggtcagaaaaccttcatgatcgatttattcagcggactggatgcttgggttctagtgagcctgttgctcgccctggcctttgtcctcgccttcgagttcatcaatggctttcatgacaccgctaacgcggtggccacagtcatctataccaaagccatgccgccgcacctggccgtgttcttctccggggtgttcaacttcctcggcgtgttgctcggcggtgtcggtgtcgcctacgccatcgtgcacttgctgccggtggagttgctgatcaatgtgaacaccggccatggtttggcgatggttttctccttgttggccgcggcgatcacctggaacctgggcacctggtacttcggtatcccggcctccagctcccacaccctgatcggctcgattctcggtgtcggcctggccaatgccctgatcaacgacatccccctggctgacggtgtgaactggcagaaggcgatcgatatcggcgcctcgttggtgttttcgccgatggccggtttcctggtcgcagccctggtgctgatcggcctgaaatggtggcgcccgctgtcgaagatgcacaagaccccggaccagcgccgcaagctcgacgacaagaaacacccgccgttctggaaccgcctggtgctggtgatctcggccatggccgtgagcttcgtacacggttccaacgatggccagaaaggtatcggcctgatcatgctggtgttgatcggcatcgtgccggcgcagttcgtactcgacctgggcagcaccacttaccagatcgaacgcacccgcgatgccactgtgcatttgagccagttctaccagcgcaacaacgccacgctcggtgaattcctggccttgggcaaaagcgtgaagaacgacctgccaggcaaattccagtgcaacccgcagcagaccgaaccgaccatcagcgcgctgatggagacgttgaaaggtgtttcggactaccactcgctgaccgccgaacaccgcattgaagtacgccgttacctgctctgcctggacgacaccgcgaagaaagtcggcaagctgccgggcctggatgcgcgtgagaagtccgacctggacaaactgcgtaaagacctgaccgccaccaccgaatacgcaccgttctgggtgatccttgcggttgcactggcgttgggcctgggcaccatggtgggctggaagcgcgtggtactgaccattggcgagaagatcggcaagcaaggcatgacctatgcccagggcatgtcggcgcagatcaccaccgcgagcatgattggcttggccaacatcttcagcttgccggtttcgacgacacatgtgctgtcgtcgggtgttgccgggaccatggttgccaacaaaagcggcctgcaaggcggcaccgtgaaaaccatcctgatggcttgggtgttgaccttgccggcgaccgtgggcctgtcggccgggttgttctggctggcgtccaaggcgctgggcagttgataagccgtctgtaataaaaaggtgcgatccgcgagggtcgcacctttttttatacctgtacctcggtacacatgtgggagccggtggatcagcacctgattcatcaactgacagactgctatcgcgggcaagcccgctcccacacaagcccactcttactgaagagcagcggcgttagttaaattgcgcgcaaaaaaaagggcgaccgaagtcgcccaaaatgccttgcgtgctcatataacccggaaagacttacggttctttacgcttattagcgtccttccagataaaaatcccgaaccctacgaaaaacaacaccatgaggctgaccgtcagcaccccggcaaacaccacattatcgaaaaacatgaccggcctcccgctcgtgccctgttgcgatagggctaagttaaaggagaaggcgggttggaaaattgacggggatcaatgtcgcccgcaacggggcgtaaagaagggcaataactgacctgcatcaacagatgcaggtggcttcaacgttttttcggtttgttcttcggcttcttcttggctttacccaacggcatcgcctgttcaaacgcctggcgaacttcattcaggcgcttgtcattcaggtcgtgcacgcgtttggcgcgctcggcactcaggtcaatcagcttgtcgtcatcactcatggcttggcttacgtcgtggcgggaatgcctcaataatgcggcctgccccgcccgacggcaaataccggggtaaaaatcttcacgccggcccaccccttggcttatttgtcgcgctcaaaggtgatgatggagcgcgtagtgcccggccagttcggcatttgccgccaaggcgtcagcacttgcagggtgtcacccttgaggcgaaagtcgcgacattgctcggtaccgacccacgcggggttccacgcgctgtctacctgcgtgcaccactggctaccctcaacccgctcgataccggtgtaggcaaccaacgtgctcaacaacgctgatttttccgcatccgacgtccccacttgtcgtccctctccggtcagtacgaaagccacgcggtgatcggcggtaaagatgacgcgcccggtaggtcgctcgcccatggcagggattttcgtatgggtgtcccgagattcaacctgatagccaatcagccgccaggcgcccaccaacggtgactcgctcgcctgcgcgtcgccgtaaaacaccgttgccaaccccatgccgactagacaagccatcacgtaatgtttcatcgttttaccgtctccagaaaaacatgaagcatttcccagccgtgaaaagacatctgtagggcatatccttaaaccaggcataaacaccgacggcaaatcaaccggcgacaaaatgcaggtcatcccccaaaattgcgcttcccatcccatctcaagaggcgccccaggtggcactgcacaaggaccttcccccgctgctggccctgcgcgcctttgaggccgtggcacggcacttgagtttcatcaaggcggcgaacgagttgtcggtcacccaaagcgccttgagccaccaagtacacaagctcgaacaacacttgggtaaaccgctatttgtccgacgtacccgtgcaattgatctgactgccgacggccagcattactacgacgaaatccgccctgccctcgatgccattgcctgcgccacccgcactcaacggatcgcgcccaccgccacggtgttacgcgtcggcttgctcgcctctttcgccaccttgtggctggccccgcgcctggccggctttatgaatcgctacccgcttatccaggtggaattgctgccggccattcaattggcgaatgtcgccgccgccgaggtcgacctggcgattcgttatggcaagggcgactggccccatgtgcaggctacgcgcctgatggatgaggccatctcacccgtatgcagcccggccttcaaggccagtcaactgcacaagggcccgctgctgatggccacctcacaccgtccattcgaatggacagactggtctgcgcattatcaagtggacctcgccaaccacccgcgcgtgatgctgcacgactacaacatcgtggtcgaagccgccgtggccggccaaggcatcgccatgggccgacaccgcctgatcgaacgcaaactcaaagacggcagcctggtggaagccttcgattggccgccctaccgcagcgatatcggttactggctgatcgcacctcaaggccccctcaatgaagccgcccagtgtttcagcgaatggctgaaggacgcttgcgcagacgcgtgagttttttcgatacgtcgcgtgagatctatccgtttgtctcccccttgccctggcccacatgctcaaccctcttaaccctggaggattgatcatgagcaactccctgcgccaacgcgtgcaagccctcggcctgacgctgccgacacccagccagccggccgccaactacatcaaccatgtcatcagcggcaaccagttgttcgtctccgggcaaatcccgctggtcgatggcaaacccgcctacataggccggctgggcgaatccctcagcgatgaagaaggtgcccaggcggcgcaactggcggcgcttggccttctggggcaattaagcgatgccttgggtgatgacctgtcgcgcctggtgcgcattctgcgcctgggcgtgttcatcgccagcagtggcgacttcaagcaacagagcgtggtcgccaacggcgcgtcgaacctggtggtcaatgccctcggcgacaaaggccggcatgtgcgcaccgcagtgggtgtttgcagtttgccggccggcgtcgcggtggaggttgacgcaattttcgagttgcagccgtgaacccactcgaaacccggcacctgcgtgacgaaacgccgggctgccagtcgggcatcgtgcatttcaaccatgccggtgcctcgctgcccagccaggcaaccctcgacgcaatcgtcgaccagctgcagcgcgaagcgcgcgacggcccgatggaagctggcgagcacggcgccgtgctggtggagaaagcccggcgtgcagccgcgcacttgctcaacgcgcccgcctcatcgattgctttcaccagcagcggctcgacagcctggagcatggcgttccaggcattgggcccttggcaacctggcgaccgcattctggtgggccgccatgaatggggcggcaacctggcgagcatggacctggcggtgaacgccggtgcgcgggtggaggtcattccttgcgatgcatccggcgcggtgtgcccgatggcgctggaggcgatgattgatgagcgcgtaaagctgatcgacctgacctggctcccggccaacggcggcctgatcaacccggcccaggccatcggcgcagtcgccaaacgccatggcattgcttactttatcgacgctggccaagccgtcggccaattgccggtggatgtgcaggcattgcactgcgatgtactcaagtcagccggtcgcaaacacttgcgcgggccgcggggtacggcgctgatgtatgtgcgcccgggtttcctgccgcgcttgaatcccgcccagcgcgacgtgttttcagcgccatggaccgcaggcggtttcgacctgcgagacgacgcccggcgttttgaaaccagtgaagtgtcttttgcgctgctggccggtttgggcaatgccttgcaagaggccaaccggctgggcgtggagcggacatgggaacgtgtcttacagctcagcgaactcattcgcgaagcattgcgtgagattccgggtatttccctgcacgacctgggcacggctcactcgggattgatcgccttcaacctcgccggctgggacgccttcgagctcaagcggcgcctggggttgaaacgcatcaatatcggcgccaatggcgtggcctacaccccgctggatatgcaggcgcgcggcctggcgagcattgcgcgaatttcggtcagcccgctcaacgacgagcaggatatcgagcggctgatggcggctttgcgggcattgcgcgattaaacctcgatgtccacccacagcccttggcgcggtgcgtcctcgatcagcggcaccaccggcacggtgttgtcggcgttgagcacgtcgccgggaatcgccaggtgctgctcggggtcctcgtcggcttcgcggcggcgtttttgttgctcttgctggcggcgctgttcttctcgcagaagaaacgtcgactgctcggaatcaccctttttcagatcgatcgtgctttcgttggagccggcttgaacgggcaccacgggcgggatatccggcttctgacgcgccggatcaagctgtgacgtgaccggcacgacgctgacgggcagcatgggtggcaacataatgattactctcctgatcaacaggctgtcggcgccatgcggggcaacttgagccccgccccgccaagctgtgaccgagtcgacactctcaagtgcccgccacccgtcgattcaacttccgaaccaccgcccaaacagggtagttttcgtcagagtccttgggcgtgggggcttgttccgttaagatagtcggctttttcacggcgggagtcaggcagcatggcgcagcagtatcaaccggggcaacgctggattagtgacagcgaagcagagctggggttaggcaccgttctggcacaggacgggcgcttgttgaccgtgctctatccggccactggcgacacccgccagtatgcgctacggaatgcgcccctcactcgcgtgaggttttcgccgggtgactccatcacccatttcgaaggctggaaaatgaccgtacaggaagtcgacgacgtcgacggcctgctggtctaccacggcctcaatgggcagaacgaacaggtcaccctgccggaaacccaactctccaacttcatccagttccgcctggccagcgaccgtctgttcgccgggcagatcgacccgctggcctggttctccctgcgttaccacacactggaacacaccagccgccagttgcagtcctcgctgtggggcctgggtggcgtgcgtgcgcaacctatcgctcaccaattgcacattgcccgtgaagtcgctgaccgcatcgcgccacgggtattgctggcggacgaagtgggcctgggtaaaaccatcgaagccggtttggtgatccatcgccagctgctgtcgggccgcgccaaccgcgtgctgatcctggtcccggaaaacctgcagcaccaatggctggtggaaatgcgccgccgcttcaacctgcaggttgcactgttcgacgaagaacgctttatcgaaagcgatgccgccaacccgttcgaagacacccagctcgcgctggtcgcgctggaatggttggtggacgacgagaaggcccaggacgcgctgttcgcagccggctgggacttgctggtggtcgacgaagcccaccacctggtgtggcacgaagagaaagccagcccggaatatgcgctggtcgagcagcttgccgaggttattcctggcgtactgctgctgaccgccaccccggaacaactgggccaggacagccacttcgcgcgcctgcgcctgctggacccgaaccgtttccacgaccttgccgccttccgcgccgaaagcgagaactatcgcccggtggccgaagccgtgcaggagctgctggacaagggtcgcctgtcgccaaaagcacacaagaccatccagggtttcctcggtaacgaaggcgaagccttgctcgccgccgtcaacgatggcgacaccgaagccagtgctcgcctggtgcgtgagctgctcgaccgccacggcaccggccgcgtgctgtttcgcaacacccgcgccgccgtgcagggtttcccggagcgcaaactgcacgcctacccgctgccaaacccggacgaatacctcgagttgccgctgggtgagcacgccgagctgtacccggaagtgagcttccagtcgcagccggacattgaagaagaaaaccgctggtggcgcttcgacccgcgcgtcgagtggctgatcgaccagctgaaaatgctcaagcgcaccaaggtcctggtgatctgcgcccacgccgaaaccgccatggacctggaagacgccctgcgcgtgcgctccggtattccggccacggtgttccacgagggcatgaatatcctcgagcgtgaccgcgccgccgcctactttgccgatgaagagtttggtgcccaggtgctgatctgctcggagatcggcagtgaaggtcgcaacttccagttctcccaccacctggtgctgttcgacctgccgtcccaccccgacctgctggaacaacgcatcggccgtctggaccggatcggccagaaacacgtgatcgaactgcacgtgccgtacctggaaaccagcccgcaagagcgtctattccagtggtaccacgaagcgctcaacgccttcctcaacacctgcccgaccggcaacgccttgcagcatcagttcggcccgcgcctgctgccgctgctggaaaacgccgacgacggcgagtggcaagccctgatcgacgaagcccgtgccgagcgcgagcgcctggagcaggagctgcacaccggccgcgaccgcctgctggaactcaactccggcggtgccggtgaaggcgatgcgctggtcgaggacatcctcgagcaagacgaccagttcgccctgccgatctacatggaaaccctgttcgacgcctttggcatcgacagcgaagaccattcggaaaacgccctgatcttgaagccgagcgaaaaaatgctcgacgtcagcttcccattgggcgacgacgaaggtgtgaccatcacctacgaccgcaaccaggcgctgtcgcgcgaagacatgcagttcatcacctgggaacatccaatggtgcagggcggcatggacctggtgctgtccggttccatgggcaacaccgccgtggcgctgatcaagaacaaggcgctcaagcctggcaccgtgttgctggaactgctctatgtcagcgaagtggtcgccccgcgctcgctgcaactgggccgctacctgccgccggccgcgctgcgctgcctgctggatgccaacggcaacgacctgtcgagccgcgtgtcattcgtgaccctcaacgaccagttggaaagcgtgccacgggccagcgccaacaagttcatccaggcccagcgcgaccagctgacgccacggatcaacgccggcgaagagaagatcaccccgcaacatgccgagcgcgtggccgaggccaagcgtcgccttgcggcggacaccgacgaagaactggcgcgcttgaccgcgttgcaagcggtcaacccgaccgtgcgtgacagtgagttggtggcgctgcgcaaccagcgcgaacaaggtttggcgatgctggacaaggctgctttgcgcctggaagcgattcgagtcctggtcgcaggctaaaaacgaaggcccgcgcaatgcgggccttctttaatgcctttcgggcctcttcgcgggcaagcccgctcccacatttgattgcatttcaactggagaaactcagtcgaatgtgggagctggcttgcctgcgatagggtcaacccggtctcatgccggaaccgccgaggccggcaccggcactgcgcccaacccctccttcatcttctgggcatcgcgcacaaagcaccgcgacgcttgaaacagaaacaacatcgtcaaaaacagcgccaccggaatcaggtacatggcgtcatgcaaccccaccgccttataagcctcggtcatctgcgcagcgccatcggcatacatcgccgaatgggcaaaatggtcagacaagccccccaccacaatcggccccatgccgccgcccagcaaatacagcccggcgaagaacagcgccatcgccgtggcgcgtaaacgcggctcgaccacgtcttggatcgccgtgtacacgcaggtgtagaagttgtaggcaaacagccagcccacgctgaacagcgccacaaataccccgatctcaatgcgccccgcgtgcagcgcccaggccgtagtgacggtggagatgatcaggctgaatgcggcaaacagcagacggccattggcaacgcgttggtggatcttgtcggcgatccacccccccagggtcaggcctaccaggcccgtaatgccgacgatcacgccggtggccaccgccgcctcctgcaatggcatcaggaagtaacgctgcagcatcggcaccaggaacgagttgcacgcataggtggcgaagttgaagcacaaccccgccagcaccagccacaggaaggtgggtaccgccagtacgcggcgaatcgggcggtcgacgcgttcctgggagacttgcacggtttccgccgcgccgcgcttgggctcctttatatagaacatgaaaatggccaggatcagccccggcacggcggcaataaagaacggcgcgcaccagctgtcgaacgccttgaccatcgcgccgatggtaaagaacgccagcagcaggcccaacggcaggcccagcatgaaaatccccatggcccgtgcgcggcggtgcgccgggaacaggtcgccgatcaacgagttggccgccggcgcatagctggcttcgccaataccgatgcccatgcgcaccagcaaaaacgtccagaaactgccaaccatgccgttgaccgccgtcaacccgctccaggcaaacaggccccagcccatcaatttgctacgcgagccggtatcggccaggcgcccaagtggcaacccggcaatggcatagacgatggtgaaggccgtaccgatgatgccgagctggaagtcgctcaggtgccattccatgcggatcggctcgatgatgatcgcgggaatggtgcggtcgaagaaattgaacaggttggcgaggaacagcaggaacagaatgcgccaggcattcgccgcttgggtcgagttctgcatgggtccgtctctttattgttattagagctgcgatgcccgatgcatcctgcccggtacctgcaacatagtcaggcgcgccccggttgtctgtaatgattcgtaaagctgatagggcatgatttcacccgtcgcaatgggactttgcctacgaaaaatataagtgccgccccctcttcccaacggccatggcacggatagaatggcgagccttcccgtagcacccttcccttactttttattgatgacgcccatgtccgaagccagtccgtgtctgagttgcggtgcctgctgttcatactttcgtgtgtctttcttttggggagagtgcgcctcatcggggggcacggtgcccgatgacctggtggtgcagatcaaccccacccgcgtggcgatgatcggcaccgaccagaagcccgcgcgttgctgcagcctggaaggcgaagtgggcaagggcaccagttgctcgatctatgaactgcgctcgagcccttgccgcgagtttgatgcgtcctggagccagggcgtgcaaaacgtcgattgcgacgccgcccgcgctgcgtttggcttggcgccgctggaggcgccgttcgaacttgacctgccgatcagcgcttagcatcaaacgctatggcgagcatgccaaaatcgttgagagcaaagtgccattatgcatggcgaatcccgtgaggcttctatactcgatgtcgtaggccgttgctgtaggcaacggcacaatgactttgacgggatttgctatggaatggcttggtttgcatttttttaccgaccttccggacactgggcacttattactcaactgcagtcataatccctttctggtgctgctggcgtacctggtcgcctgtgccgcgggtttcggcacgctggacatggccgagcgtgtcggcaacgtcgaggacccaaccgcccgccgccattggcgttggctgggtgccggttgcctggccggtggcatttggtcgacgcacttcatcagcatgctggccttccaggcacctatcgccattcattatgaattgctcatgacgttcgcctcactggtgatcgccctgattgcctcgctgtttgccatgcaaaccctcagtcatgcccacctgcgctttcatcagtatctgttggcgtcggtatggatggggctgggcattgcgttgatgcactacgtcggcatgtcggcgatgcgctcgcaagctcaagtgtatttcgagacagggctgttcatggcctcggtgggcattgccatcggtgccagcctcaccgcgcttttgctctcgtgctacctgcgcgatggggccggggtgttccatcaattactcaaatatgccgccagcctgatactgggggccggcatcctgagcatgcatttcaccggcatggcggccatgcaaatgctggtgcccaccggggccgatctatcgttaccggtggacaacaaccccattcaactcgggctgtcggtggcggtgattaccctgctggtcatcggcagcagcgtcagcgccgcccttgcggataaaaagttgcagcacaaggagcgcgacctgcgccgggtcaatgcgctgctcagcgaactggaccaggcccgcgcctcgctgcaacaagtggcccactacgatgcgttgaccagcctgcttaaccgtcgggggttcaaccagatctttgcggagaaagtcgctgaaaaagccgtcagccacggcatgatggcggtgatcttcctggatatcgaccacttcaagcgcatcaacgacagcctcggccatgacgccggcgaccaattgctcaccgtactcgccgggcatatcaagggctcggtacgcagccatgatgacgtggtggcacggttcggtggcgatgagttctgcattctgatcaacatccaccatcgcgatgaagcgcggcacctggcgcagcgcatcatgcaaaagatgaaagaacccatcgaactggccggccgacgcatggtgatgaccaccagcattggcatcagcctgtttcccgacgatgggctgacctgcgaagaactgctgaaaaccgctgacttggcgttgtaccagtccaaggacaccgggcgtaacagcctgaactttttcagttccaacctgaaaacccgcgctttcctggagttgcaactcgaagaagagctgcgcgccgccctgcgtgggcgcaatgaattggtgctgttctatcaaccgatctttgacatgaagctcggcaaagtcacccggctggaagccttggtacgctggcagcacccgcgtcatgggctgctggcgccggaccggtttatcggcattgccgaaaacaacgggctgattgccgacctggaccactgggtattgcgccaggcctgccacgacttgagcttgttgtctgatcgcggctacaccgaactgaccatggccgtgaactgctcggcgctgaatctggcgcgtgatgagctggcggatgaaatcgaagcggccctgcgcttcgccgggattgccgccaaccgcctggagttggaagtcaccgaaaatgccctgatgggcaatatcagcagcaccctcgcactgctgcggcaaatccgtgcgctgggtgtgtcactggcgattgatgacttcggtaccggctattcctcgctggcctatctcaagcgtttgccgctcaacacgttaaaaattgatcgctcgtttatccaggacatccccaaatccaccgcggacatcgagatcgtccaggcgattatcggcatggcccacacgctgcacctgcaagtggtgactgaaggggtggaaacccaggcccagttcgaactgctgctcaaacacgactgcgacttcattcagggctacctgctgagcccggccgtgcctgccagtgacattgttggcgtgatgcaaggtatccagatgcgcaacccgctctaccctttcagcgtggaaggcaacaaggatgcctcatcgccaaaagaaccggctcccggacgcattggcccgccctccatcgtcaggccaattcgctgacgccgaaattttggcattctgccatcattcgcctaaagaaccccgacgaacggccgattcatcagaatccggcctggcttccccttgtatacagggggtaaacctgaccgccccatccgtccaggtacatgccgcccatgacttccaataacaacgctgccaccgtggttcccgatctgttgcctacagctaacgcagaaaaaccctcaggttcgaggtcattgagcagcgcccgtccgctggcgacccagcagtacctgtacttcaccgaaaccaataccgaccgcatcctcgacaacctcgacggcctgcgcgacatggtgttccctcgcccacttcaaccggaagccgaaggcgccccacgcagcgagcaggcatttccctcggtctgcctgatcggcctgggccgttgcggctccaacattgcgctggacgtggcagagctggtgtacaacgcgcgcaagttctacctgaacgaattcagcgccgaagataaaacccaggacaagggttacagccccgcccaatggatccgcaataacctgcggctgggcagcggcaaggccagcaagccggtgttcctggtggagccgctggtgatgctcggtgacctggacaaggacatcgccgggcgcatccgcttctcgcgcaagggcgaaaaaagcggcttcctgcgcgactacagcaagatgaaaatcatggacctttcggaggtgcatgccggcggcgcgggtaacgcgccgatcctcggccagtacctggccaagatcattctcaacaaagacacccagcgtttttccagccccgactggaaaatgatccactcgtacctgatcgactcctgcggcatcaaggccaaccagtcgcgcctgtatttctcgatcttcagcgccggcggcggcacgggctcgggcatggcctcggagttcggcctggcccagcaacattcgtacatgaacaagacgttcgacaccaagcccgccgacgagcacgatagcaaaagcggacacgcctttgtgtttgagccaatcttcaccagcggcatctgcgtgttgccgaacatctccgatcaccgcagcgaaatgtccgaggcgctgcacatcaacgccgggcggctgctgtgcaagtatctgtcagaggaatgggacttctcgtacaacttcgacaatgaagacagcagcgaagcgagtgtcaaaggtcgcatccggccctggaacgcgatgatgctgatttccaacgacatcatgcgttacgccgaagaaagcgatgacggcaatatccagaacattgacgtcaatgccatggaaaaacacgccaaccaatatatctcccagcagatcttcaacattctgacggcccaggcggtaacgactgactatgatcagaactacttccgtcgcgccggtatcgacatcggtgaaaccatccgcctggatgccaacgacctcttcatgagcctggccgggccggtcgcgattgcctatgccgaatcggtggttcccgagacgccagcgccgtcgaacgacaagttcaaggtgttcgataaagagccacaacgcctgaatatcgatgacttgttcttccgctccatcgacctgccgcacttcaataaggtcacacaggccattgaaggcatcagcctgctgccgattgaatccaagcgctacaaggcgtccctggagcaatacaagaattccggctacgacgcagcggcgttgcacgacctgcacttcttcaagaactgttcttcggcggtgtcgattgtctcgctgcccaaggattacaagctgtcctacatggaccttaaccggctcaagacccacctgaacagcttgtttcccaatacgacactcaaacgctacgcactggtgatcggcgcgtcggccaacttgtcgctgaccacgttgatcgccaagagcccgtgcctgtcggacgactttttgacgttgatcgtggcgtttatcaagcgttgtttcgcgcgcaacgcctaccggtttgatgacacgctggacaactcgattctggatttcatcatccacgaggattttgacgaagaccggattgacgacttgcttaacgaattcgaaaacccggcgaagattctggataccaactggtacgcgatcaaaccgatgtatgagaagaagtaccgcgagctgatcaacgacaaagacaagttcgtgtcgatcaatgacattcgcctgtcacgggactgcgtgaaaaaagcgatcaagtacctgcgtgagatttatcgtcaccggatcggcaagaccaaggttatttcgttgaataaccatactgggaaaacggcgtagaccgagccgcctttatcgcaggcaagccagctcccacacttggaatgcatgtcaactgtgggagctggcttgcctgcgatagcgtcaatcacacaccaactatctacagctctgccacacccggaaacaattccctacccgcttggccctgcgtaaaactgttcccgtgacgcgcacgtcaccctgttctgtgacctttctctacggcaaggtgccatcacggcgcgagcggttactcggctacacacttctcaccgcaaaaaacacgcaccttttaagtgcgccaaattcttacgacgccctttcctggatcagaatccacggcgaaaccaccaccgcccacaggctcggatcacgctcaaccaggtccaatgcccgcgtcgcagacacttcgccaaggctgcccgaggccagccagccagcgactttctcgcggttatcctcggccattccctcggccgcttcgatcaaatccagaccggcgtcgacccacaatagggcacccttggcaaagaacggctcgagctccttccaggaaatttcggcggtttcaccgagcagcttggcatagagggtgctaggttcttgcgtcatgggaattcacctgagtaaaaaatcggcgcaatcataacgtcgcgactcttgtagaaaaacccagttgcaaatgaggcatcgaacgaaagtgtcagaaaagccaaggattgcccgaaactctggcatcaccccgccgcaattctgtctttttctttcatttaagcgacatccccgggttttgcccccagcagccagcttttcaagcgatgaaccggcgctctacactgtaccggtacagttgccagggcacggccggggggatatccgagatatctgatccggttctgcagctcacaaggccgctagaactataaaaaatacaacagcaagagtggagcactatgaataaggctactaagcagatttccaaactgtttgccgctatggtcctggctggggttgccggccattcgttcgcagccgacaccatcaagatcggcatcgccggccctaaaaccggcccggtgacgcaatacggcgacatgcaattcatgggtgccaagcaagccatcgccgacatcaacgccaagggcggcgtcgacggtaaaatgctcgaagcgaaagaatacgacgacgcttgcgatccgaaacaagccgtggccgtagcgaacaaagtggtcaacgacggcgtcaagttcgtggtcggtcacctctgctccagctccactcagccagcgtccgatatctatgaagacgaaggcgtcatcatgatcaccccggctgccaccagcccggaaatcacttcccgtggttacaaactggtgttccgtaccatcggtctggacagcgcccaaggccctgcagccggtaactacatcgccgaccacgtgaagccaaaagtcgttgcggtcattcacgacaagcagcagtacggtgaaggtatcgccaccgccgttaaacagaccctcgagagcaaaggcgtgaaagttgccctcttcgaaggcattaacgctggcgacaaagacttcggctccctgattcagaagctcaagcaagccaacgtcgacttcgtctactacggcggctaccaccctgaactgggcctgatcctgcgccaagccaaggaaaaaggcgtgaacgccaagttcatgggcccagagggtgtcggcaacgactccatctcgcaaatcgcccagggcgcttccgaaggcctgctggtcaccctgcctaagtcgttcgacaccgatccagccaacaaggcgatcgttgaagaattcaccaaggccaagcaggacccaagcggcccattcgtgttcccggcctactcggctgttgaagtcatcgccggcggtatcgctgccgcgaagtctgaagacactgccaaagtggctgctgccatccacgcaggcaccttcaagacaccaaccggcgacctgagcttcgatgccaagggcgacctgaaggacttcaagtttgtggtctacgaatggcacttcggcaaaccaaaaaccgaagtttctcctcagtaagccaggcgttactggtccaacaagcccactgtgagagcagtgggctttgttttacgaggtttatgggcctgacacccgcgatccgggcgctggctcacctgaaaatcttaaaaccgtcaccagcggttcgctggcaaacgcttcgtgcaacctgatcatagagcagggcatcgagccggaaatgactccaccagtgaaatgcgtatcgggtttttaggagcgctgtaatgcctgagatctatcattttttccaaacgctggttaacggcatgaccgttggcagcacctatgccttgatagccattggctacacaatggtttacggcatcattggaatgattaacttcgcccatggcgaggtgtacatgattggttcctacgtggccttcatcgcccttgccgggctggccatgctgggtatccattccctgccgttgttgatgaccgccgcgttcctggcgtcgatcgtcgtgaccagtgcctatggctacagtatcgagcgcgttgcctaccgccccttgcgtggcagcaaccgtttgatcccgctgatttccgccatcggcatgtcgattttcctgcagaacacggtattgctgtcccaggactccaaggacaagtccattcccaacctgatcccggggagcttttccttcggcccgggtggcgcacaagaagtgctgatttcgtacatgcaggtcctggtcttcgtcgtcaccctggtggccatgctgggcctgaccctgttcatctcccgctcccgtctggggcgcgcctgccgggcctgcgccgaagacatcaagatggccaacctgctgggcatcaacaccaacaacatcatcgccctgaccttcgtgatcggtgccgcgctggccgccgttgcggcggtgctgctgagcatgcagtacggcgtgatcaaccccaacgccggtttcctggtgggcctgaaggcctttaccgcagcggtcttgggcggcatcggcagtattccgggcgcgatgctcggcgggctggtgctgggtgtggctgaagcctttggcgccgatgtgttcggcgatcaatacaaggacgtcgtggcgttcggcctgttggttctggtgctgttgttccgtccgaccggcattttgggccgtccggaggttgagaaagtatgagcagatatcttaaatcggcgtttttcagcgcgctgctggtttgggcggttgcgttccccgtcctcggcctcaagctgagcattgtcggcatcaacctggaagtgcatggcaccggtcccgtgaccctgaccatcattgccctgtgttcggtgctgatgttcctgcgcgtgctgttcacccagcaggtcggtgccgtgttcaagggcaaccgtggcccgctggtatcgcccaaggtcagccaattcctgaccctgccgcgcacccagcgttacatcatcatcgcgttgatcattgctgcactgatctggccgttcttcggctcgcgcggtgccgtcgacatcgccaccctgatcctgatctacgtgttgctgggcctgggcctgaacatcgtggtgggcctggccggtctgctcgacctcggttatgtgggcttctacgccgtgggtgcctatacctacgcgctgctctcgcactacctgggctggggcttctggatctgcctgccactggccggtatggcggcggccacctttggcttcctgctgggcttcccggtgctgcgcttgcgtggtgactacctggcgatcgtgaccctgggcttcggtgaaatcatccggctgttcctgcgtaacctcaccgatattacgggcggccccaacggtatcagcagcattcccaagccaacgttcttcgggctgtcgttcgaccgtagcgctgctgaaggcatgcagacgttccacgagtacttcgggatcgactacaacccggtgagcaaggtggtgttcctgtacctggtggcactgctgctggcgctggcggccttgttcgtgatcaaccgtttgctgcgcatgccgatcggccgtgcgtgggaagcattgcgcgaagatgaaatcgcctgccgtgcactgggcatgaatccgacagtcatcaaactgtcggccttcaccctcggcgccacattcgccggtttcgccggcagcttcttcgccgctcgccaaggtttggtgaccccggagtcgttcacctttatcgagtcggcgatcatcctcgccatcgtggtactgggtggcatgggctcgcaactgggcgtgatcctggccgcaatcgtgatgatcctgctgccggaaatgatgcgtgagttcagcgaataccgcatgttgatgttcggcgccatgatggtgctgatgatgatctggcgtcctcaaggcctgctgcccatgcaacgtccacacatggagctgcgcaaatgagccgcgagatcctgaaagtcgaaaacttgagcatgcgcttcggcggcttgctggcggtcaacggcgtggccctgacagtgaaagagaaacaggttgtggcgctgatcggcccgaacggcgccggcaagaccacggtgttcaactgcctcaccggcttctacaagccgagcggtggcagcatcctgctggatggccagccgatccagggcctggccggtcacgagatcgcccgcaagggggtggtgcggaccttccagaacgtgcggttgttcaaggacatgacagcggtcgaaaacctgctgattgcccagcaccgccacctgaacaccaacttctttgcaggcctgttcaagaccccgtcgttccgcaagagcgagcgcgaggccatggagtacgccgagtactggctggacaaggtcaacctcaccgagtttgccaaccgccctgccggcaccctggcctatggtcagcaacgtcgcctggaaatcgctcgctgcatgatgacccgcccgcggatcctcatgctcgacgaaccggccgccggcctgaacccgaaggaaaccgaggacctcaaggcactgatcagcgtgctgcgtgaggaacacaacgccaccgtgctgttgatcgaacacgacatgaaactggtcatgagcatttccgaccacatcgtggtgatcaaccagggcacgcctttggcagacgggacgccggagcagatccgcgacaatcctgaagtgatcaaagcctatttgggggaagcgtaaaatgctgcaattcgaaaacgtttccactttctacggcaagatccaggccttgcacagcgtcaacgtggaagtgcgccagggtgaaatcgtcacgctgatcggcgccaacggtgccggcaaatcgaccctgctgatgaccttgtgcggctcgccgcaggcgcatagcggcagcatccgttatatgggcgaggaattggtcggcaagcattccgccgaaatcatgcgcaagagcatcgcggtggtgcccgaaggccgccgcgtgttctcgcgcctgaccgtggaagagaacctggccatgggcgggttcttcaccgacaagggcgactaccaggagcagatggacaaggtgctgcacctgttccctcggctcaaggaacgcttcagccagcgcggcggcaccatgtccggtggcgagcagcagatgctcgccatcggccgtgcactgatgagcaagcccaagctgttattgctcgacgaaccttcgcttggcctggcgccgatcatcatccagcagatcttcgacatcatcgaacagctgcgcaaggacggcgtaacggtgttcctggtggagcagaacgccaaccaggcgctgaaaatcgccgaccgtgcctacgttctggaaaacggccgggtggtgatgcagggaacgggtgagcagttgctgaccgatccgaaagtgcgcgaggcttacctcgggggctaaatatccggtagctgtatgaaccggatctaaaatgtgggagcgggcttgtgtgggagctggcttgcctgcgatagcatcaccgcggtgtgactgacacaccgaggtgcctgcatcgcgggcaagcccggctcccacacaagcccgctcccacttttttgtgtggcgcaaagttttttaaattattttcgtcgggcgtgtaacgaaattcgtcctgctgcctctagtggagtaagcaggcaaacatgcctgatacctcaacccactgctggagctacaccatgactaccaaactctccgccgctaccctgatcctcgccctcggctccgctctgagcctgtccgccatgtccaacatggcccacgctgacgacgccaaaatggacaaatgcttcggcgtcgctgaagccggcaagaacgattgcgccgcaggcgctggcaccacctgcgccggcacctcgaaagtcaaagaccaagccaacgcctggaaactggtcccggccggcacctgcggcaaaaccaccagcgccacctcgccgaccggtttcggtcagctgcaagccttcaccgccaagtcctgaaaccctgcgcaacctgagtactgatgatgacgcttttaccccagcacacggtctcgccagctcaggtgcccggcctcccttacagggccgggctggggctgaagaacgaacacttcatcgaagtgcttgagacttcacccgacatcggtttttttgaggtgcacgccgaaaactatatggtggccggcggcccttttcatcactacctgggtttgatccgcgagcagtacccactgtcgttgcatggcgtgggcctgtccatcggcggcgaagggccattgaaccgtgagcacctggcacggctggccacgctgatcgaacgctatcaaccccactctttttccgaacacctggcctggtccagccacggcccggtgtttctcaatgatttgctgcccgtggcttacgatgccgccaccctgaaccgggtgtgcgaacacatcgaccaggtgcaaagcaccctcaggcggccgatgctgctggaaaacccctcgacgtacctgcaattccggcattccacgctggacgaggcggacttcatcagcgagatcatccgtcgcaccggttgcgggctgttgctggacgtcaacaacgtctatgtgtcatgcatcaaccatcagcgtgatcctctttcctacattgatgcgctgccgttgcgcgccgtgggtgagatccatctggcaggttttgccgaagacaccgacagcctcggcgaccgcctgctgatcgacgaccatggcgcccccatcgataacgcggtgtggcagctgtatgagcaggtgctggcacgcaccggcccggtggccacactgatcgagcgggataaccaggtgccggccttcagcgtcttgcaagcggaagcccaacacgccgactggcacctcgcgcaggtggcctcatgagccatcaaacagcgtttgccaacgccctgctcgcgcccgaccaagcctgccccgaaggtgtattcagcagtaacggtgccgaccccgccagccgtttttcggtgtaccgcaacaacgtccacagctcgttgatcaacgccttggcggcggcttacccggtgactctgcaattagtcggcgaggagttctttcgcgcgatggccgccctgttcgtacaagcctgcccgccgaccagcccgctgatcagcgagtatggcagcgcgttcgcggcctttatcgaggactttgagccagcggccagcgtgccttacctggccgatattgcacgccttgagcggctgcgcgtacgcgcctaccacgcggcggatacccaagcgctggaccagcaggcggtgctccaggggctgcaaggtcaggcagacctgggaaaactgcgcttgcgactgcatccctcgcttgccgccctgaactccgcctatgccgtcgtagcggtgtgggctgcgcaccagaccgaaggtgccatggccagtttggacccctggcatgcccaaggcgcactggtcctgcgtcagggccttacggtcaaggtgttcgccatcgacagcggttcggtcgcgtttatcaacagcctgaaccagggcacagaactggagacagcggtggctcacgccctcgaagcctccaccgaattcgacctgaaccactgcctgacgctactgatcagccacgacgccatcactggcctgcacccagaacaaaaggaatcaccatgagcacttcttcttcgaaccccatcaaccgggtgattgcactgttcgagaaaatcccctatagcctgatcgcctttctcgcacgcttctcgattgcagcggtgttctggaagtccgggcaaaccaaggtcgaaaactttgcgattgacttgatcagcggcacgttccaactgggcgcgccacggctggccccctccaccattccgctgttccagagcgaatatcatgtacccctgctctccccggaagtggctgcacacttgtccgcattcgccgagcacttcttccctgcactgatcctgatcggctttgccacgcgcttctcggccctggccctgattggcatgaccctgaccattcagctgtttgtctacccggaagcctacccgacccacggtacctggatcgcgatactgctgctgttagtcgccaagggcccgggctgcttctccatcgatcatctgatcgcacgccgctaccgttaaagacgatccagggcttcgccgctgcgcttgaaccagtcgaccaaatagtcggcgagtacctgggttcggcgcggcaggccaccctgataaggatgaaccagatacatcggcatgcttcgcgtctgataatcacgcaggagccagcgcaatcggccgtcagccaattccgcaggtagcacgtaggacggcaggcgcgcgatccccgcgccgaccagcgcggcctttttcaacaggttgtagtggttggaggcaaaggtgccgctgacccgcactcgcaacagctcatgttgctggtgatagagccactcctcgcgcccgctgtaatggctgttgagcaggcaggtatgggtggcgagatcagccggggtcaatggctcgccgtgctcctcaaggtaggccgggctggcgcaggtcatttcgtgccaggccagcagcggtttggccaccagtcgctcattttcgatagcccccgtgcgtacgcccaaatcaaagccgtcccgcgccagatcgcggtagctgttgttcaactccagctcgatctgcacctgcgggtattgcttggaaaattccagcagcaagccgtcaaagaaggtttctcccaacgataccggaacggtcatacgcaccggcccggccaaatcgtccttgagccgcgccaacgcctgacgtgcacggtccacctggacgacaagcgcctgagcctggggcaacaacgccgccccggcagcagtgaggctgagcttgcgcgtggtgcgatgcagcagcaccacggaaaactgtgcctccaattggctgatgcgcttggacagctggcctttactgcagccaagttgctcggcggctacggtaaaactgcccgcttcgatcagcacggcgaaggccgccaggtcatccatctcgctcatggattgtttccatttgaaaaccaaaggttgcctattagcgcgtttatccagcgaaaaagccactctagactgaactctcacttaccccctggaggaacagcacgatgaaaatcctattgattggtgccagcggcacggtcggctcagcggtcaagacagaactggcgcagcgtcacgaagtgatcagcatcggccgcaacagcggcgacttccaggtggatatcagcgacagcgcctcgatccgcaagctcttcgagcaaaccggcaagttcgacgccctggtctgtgcggccggcagcgtgaacttcgtcgcgctgggcgacatgagcgacaccgattttgaactgggcctgcgtgacaaactgatgggccaggtgaacctgctgctgatcggtcgcgaatacgccaacgacggcgcctcgtttaccttcaccagcggcattttgaaccgtgacccgatccgcaccggtgcctcggcagcactggtcaatggcgcgctggatgccttcgtcaaagcggcggcgatcgaattgccacgcggcctgcgggtgaactcggtgagcccaaccgtgttgctggaagcgatgggcagctatgcaccctatttccggggtttcaaaccggcaccgggcgccgatgtggcactggcctacgcgaaaagcgtcgagggcttgcagaccggtcagacctacatcgtgggttgagcagccattgcctcacgtgaaaactcagacatccatttaacgaccagcgcacgcggggctgaaaatctgaacgccccgccaagctggctttgaactctggttgtgcttagttgataaccgtctacgtagagcgttacatacttttggtaggccagcagcgtaatggattgtgtcctcgctttggcctcagggctcagcgagacatgcacgtcaacgtcatctgaatcagactggccggcatgtttgagcgtcaccgaaatgtcggtgaagtcggtgattgacgagtaagacagccgggcgggctcgtctgaaatggcaacatttgcgcagagcagaagaacacagatgctccatttgaaattcatggcaatctccagtcaaaagaggtcgaaactctcacgactctccaaattctagtgtaggaaacatctcaaacaacaacgcgcggtttcccatcattgcgaggcagacgcttcaaactgcgtcccgtgcttgtgatgcagcgccagcctgcgtaacgtggcggcacttgtttggagaccgatcaatgcgtgccgcccgtaccctcgtcctgtttgccctgctgccgctgttcaccgcttgccagatgtttgaaagcgaacctgcaaaaccctctaccgtcgggatgacccgcatgcagggcgagttgactgccgtcggcggcaagctgctgttccaaccctgtggcgaccagcgcaactatgtggtcaacgacaccggcggcaccagtgtactgcaggaagccgcgtccctggctggccagcaaggcacgctgtttgccgacttgcgcggcaagttctccggcgtcgctgccggcactcagggctcggtggagttgcagcagctttatcgcgtcgagcgctcgacctcggcctgcaacgacccggacttcaaacgcatgatcctgcgcgccaatggccacaagccggcctgggcaatgaatgtcacagccaagggcatggtgctggaacgcgaaggccaaccgccattggccgtaccctacgtagaagagcaaatcggtgacggccgtttcaacctgatgacggaagccaacaatcaacatgtcgagctgtgggtagccccgcagcgctgcgtcgacccggtcagcggcagcctgcagcacatgaccgccgagctgcgcgtcaatggccaggtacagcgcggttgcgccgcattcggtggttcgcgcgacgactgattgcgcaccccgttgttttaacctgacggaaaaccgcctttggggcttataatcgccggtttgcaaaacagccggcatcaaagcccgccgcctaccggaccctgtcatgttacgaatcaccgaactcaagctgcccatcgaccatcccgaagaagacctgcggcctgccatcgtgcagcgcctgggcatcgccagtgatgacctgctcgatttcaccctgttcaaacgcagctacgacgcccgtaaaaagtcgtcggagctgtgcttcatctacaccatcgacctgaacgcgaagggcgaagccgccctgctgctcaagttcgctgatgaccgcaacatcaacccggcgccggacgtcagctacaaggtggtgggccaggcgccggaaggcctggtcgaacgcccgatcgtggtggggtttggtccgtgcgggatcttcgccgggctgctgctcgcgcagatgggcttcaagccgatcattctcgagcgcggccgcgaagtgcgccagcgcaccaaggacacctggggcctgtggcgcaaaaatgtgcttaaccccgagtccaacgtacagtttggcgaaggcggcgccggtaccttttccgacggcaagctgtacagccagatcaaggacccgaaatttcacggccgtaaagtgctccacgagttcgtcaaggctggcgcgccggaagaaatcctctacgtcagcaagccgcacatcggcaccttccgcctgaccggcgtggtggaaaacatgcgccagcaaatcatcgccctgggcggtgaagtgcgcttcgaacagcgcgtgactgacgtgctgatcgaagatggccagttgaacggcgtggtcgtcgacggcggcgagcagatcctttccaaacacgtcatcctggccctcggccacagcgcccgcgacacgttccgtatgctccatggccgtggcgtgtacatggaagccaagccgttctcggtgggttttcgcattgagcacccgcaatcgctgatcgacgccgcgcgcctgggcaagtacgccgggcacccgaaactcggcgcagccgactacaaactcgtgcaccacgccaagaacggccgctcggtctacagcttctgcatgtgcccgggcgggacggtggttgcggcaacgtccgagccgggccgcgtcgtcaccaacggcatgagccaatactcgcggaacgaacgcaatgccaactccggcatcgtggtcggcatcacgcctgaagtggattacccgggcggcccgctggccgggatcgagctgcaggagcgcctggaatcccacgcctacatcctcggcggcagcaactacgaggccccggcgcaactggtgggagacttcatcgccggcaagccgtccaccgcctttggcagcgtggagccgtcctacaagccgggcgtggcgctgggcgatttggccctggcactgccggagttcgccattgaagcgatccgtgaagcactgccggcgttcgagaagcagatcaaaggctattcgctgcacgacgcggtattgaccgggatcgagacccgcacttcgtcgccactgcggattacccgtaacgaaacaatgcagagcttgaacgtgaaaggcctgttcccggcgggtgaaggcgcagggtatgccggcggcattctgtcggcaggcgtggatggaatccggattgccgaggcgctggcgcgggatatgctgggcatcgaagcctgattacgttattacgaccagccccctcaaatgtgggagctggcttgcctgcgatggcggagtatcagtcgacgcatttattgactgaaccagcgctatcgcaggcaagccagctcccacattggtttgagcgttgaatcagatgttggcgcgcaagatgctgtccggcagcgactcaccccgctccacactcgccgcaacggccgcgatcaaactgcccagctcgtaaccctgcgcggtaagccacgcctgatcataataggtggtcgcataccgctcgcccccatcacacaggatcgccacgatcgaccccgactcccccgcggctttcatctgctgcgcggccaccagagcgccgatcagattagtcccgctggacccaccgacccgccgtcccaaccgctcagccaagtaatgcatggcagccagggacaatgcatccggcactttgaccatcgcatcaatcacgttcggcaaaaatgacgcttctacgcgtggccgcccaataccttcaatgcgcgaaccacaatccagccgcaagctggcgtcacccgtctggtaaaagtcgaagaacaccgagcgttcggcatcggcgcacagtacgcgggtgcaatgctggcgataacgtacataacgccccagggtcgccgtggtgccgcccgtgccggggctggaaatcagccagctcggctcggggtaatgctcgaagcgcatctgctggaagatcgattcggcgatgttgttgttcgcccgccagtcggtggcgcgttcggcgtaggtgaattggtccaggaaatggccacccgtttccttcgccaggcgctcggactcggcgtagatctgcgtcgggtctttcaccaagtggctcttgccgccgtaaaaggcaatctggtcgatctttgcttgagaggtcgtggccggcatcactgcaatgaaaggcaggccgagcaagcgcgcaaagtacgcctccgaaacggccgtagaaccactggacgcctcgatgacgggcgcccctggcttgagccagccgttacacagcgcgtagaggaacagcgaacgggccagtcggtgcttcaggctgccggtcggatggctggactcgtccttgaagtacaactcgatacccggcaaccccggcagtggcagaggaatcaggtgcgtgtcggcgctacgctgaaaatccgcttcgatgatacgaatggcttcgcgtgcccaggtacggtggtcgctcataaggtggatctctgaagatttcagccccaattttagggggtttcctacactgcacacagatacagtgacgactcaattggacacacaattgccaggctttggcataaccccaacccacgtcgctgcttataacaaataagaatataacttttgttttaacaactaacggtacgggttagggtacccacctattgaacctggattggagagcatctcgtgcctctgcgtagcactttcacccgtttcttccagctggaggctgccagcggcctgttgttgatcgccgctgccgccttggcgctgatcatcaataattcaccgttgtcgcacctgtacaacgcctttctcgacacccccgtggtcgcacagatcggcgctgtaaaaatcgccaagcctgcgctgctgtggatcaacgacggcctgatggccctgttctttctgctaatcggcgttgaggtcaagcgcgagctgcttgatggccacctgtccaaaccgtcgcaagtggttttgccaggcgcggcggccattggagggatggtcgttccagcactcatctactgggcaatcaacaaggacttccccgccgcactctcgggctgggcgattcccatggccaccgacattgcctttgcattgggcgttttggccttgctgggcaagcgtgtgccggtgtcgctgaaactgttcctgatgaccctcgcgatcattgacgacctcggcgcgatcatcgtaattgcggtgttctattctaccgatctctcaggcgcggccctggcaggtgcaggcgcgtgcctgattgccttgatcgcaatgaaccgcctgggtgtgatcaagcttgggccctacctgatcatcggcctgatcctgtgggtgtgtgtgctcaaaagcggcgtacacgcaacgctcgccggcgtgaccctggcgttctgcatcccgctgcgcaccaaaaatgccgagccatcgccattgctgacactggaacacgcgctgcatccgtgggtggcctacggcattctgccgctgttcgcctttgccaacgccggcgtctcgctggctggggtcagcctcgacagcttcacccaccacgtacccatgggcatcgccgccggcctactgatcggcaagaccgtcggcgtattcggcctgacctggatcgcggtcaaaaccggcctctctgcgttgccgagcggtgccaattggggccaggtattcggggtggccatcctgtgcggcataggcttcaccatgagcctgtttgtcggctccctggcgtttgtgccgggcgccagtgaatttgccggcgaagaccggatgggcattctgaccggctcgatcctggcggcgtgcattggttatgcggtcacggcgatggcgagccgcaagcacgcctgatcttctgaaacgctctgaaaaccccaaccgggtgaccggttggggtttttctttttgcgcagctcaggtttcatcatcagccacctaaagacttgccccctcccgccgactatctgttgtggcgatctcactgcccgcacttgctccccaacgcgtttcagcccgagcgacaagcccatgttcctgagaaatataagaatcgcggccagagcctttatcggcttcgctgctattgcgtcgctgagtgtgtttctcggcctgtttgccctcaaacagattggcgaagtccagtcccaggcaaccgacattcagaacaactggatgcagcgtgtacggttgctggccctggcgaatgcctcgctcgaccgtttccgcctgggcgaaatggcgcacatcctgtcctcaagcgatgcggatatgcagacctacgaagataaatctgccgggcgcttgaaagccgtcaaggagcaactgggtcaatacgccgcgctactgcgcacaccggaggaaaagtcccggcttgaggtgttcaaccagagccttgatgggtacgcgaaaaaccacaccgagatgctcaagcgctcacgctcaggcgacaaggccggcgcccgcgactttctcaacagcatccgggaaagctatgaacagatgaccaagaacttcgaccagttgatcgacctcgccaacaaaggcgcagaacaggccgggcgcacctccgaaaacgcttaccggcatgcggtaaacggtattgctatcgttatcctgctggtgagtgccggcaccgtgttggtggcgtggctgctgacccgaagtatcaccgggccgatcaatgaagccgtgcaggtagccgaaaccattgccaaaggcgacctgacccacccgatcaatcccacaggcaacgacgaagccacgcgcttgcttcgggcccaggaaaccatgcgtaacaacctggtgcagaccctgcggcaaatcaccggctcatccagccaactggccgctgcggccgaagagctgaatgccgtgactgccgagggtagccgcgacctgcaacagcaacacggggaaatccagcaggccgccaccgccgtcaccgagatgaccacggcgattgaagacgtcgcgcgcaatgcggcatcgacttccgacctgtcccaggagtcgcgcagtattgcgttgaaaggtcagcaacgcatggttgaggcgctgaactcaatccaggcgctgacccgtggggttgaagtcagctccgggcaagtcggtggcctcgccgagcaggccaaagggatcggcaaggtgcttgatgtgattcgtaccattgccgagcagaccaacctgctggcgctgaacgccgccatcgaagccgcccgcgccggtgaagccgggcgaggtttcgccgtggtcgccgacgaggttcgcgccctcgcccatcgtactgcccaatcgacccaggaaatcgagcagatgatcggcagcatccagaccaacaccgccagcaccgtcaacaccatgctcgacagcagcaccatgacccggcaaaccctggggctggccgaactggcgcaacaggcactggcggatatcctggcggccaacgacgagatcaacgaccgcaacctggtgatcaccacggcagcggcggaacaggctgatgttgcgcgggcggtggatcgcaatttgctgaatattcagcagctgtcgattcaatcggctgaaggttcgacgcaaacgacggccgcttcgcaatcactggccagcctggcgcatgagctgaatacgatggtgaagcactttcaggtttgaactgacgcttggaggggctagcgcaaccttgtggcgagggagcttgctcccgctgggccgcgaagcggccccagaaatgggactgctgcgcagtccaacgggagcaagctccctcgccacaggtacagcgttcgcccttaactgactggcattagggcaaacccgctcgccactaaaaccaaaaacccccaaccagtcacccggttgggggttttgtgttgctgcaaccgacgcttaacgggtaacgcggctggtaccgttgacggtcatgatgcgtacgcggtcgccaatgcggaagatttcgttctcttcaaccgcctggacgtaggcgcgcatgctgccgtcgtcttcgcgaacggtgatttccacgccttgggtacgggtcaggccttcttcagtggccgaaccgagcaggccaccggctaccgcgccgatcactgcggtcacgatgctgccacggccgccgccgatggcgctgccgccaacgccgccgatgactgcgccggcagcgccgccgattggggtcttggtaccttcgatcttcacgggacgcagggattcgatggtgcccatgcgaacggtttgtacacgacgcgcctcgtcacgggagtacgagtcgccggtcagactcgaggcgcagccacccaacagcaacgacagggtggtaaagcaggcaactagtaaaacggacttacgcatagcatcaactccaaaggacaggtattcattagacgctgcggcttggcgcctgtcacggcaagccaggcagaaaattgctttcattcagccttagtacagactgccagtaccagaaaactcgacgaacggtagcactcgacatgttccaaagaatgtcatggacccactcggcagtgtagccgtcacgcagccgcacacgccccgagacgcttgagtaaaacgtcggagcggcacgcaatattcctggaaggtgacgaaaggcgaagctcagggcgccaggcgttcgcgcgtccactcgcccgcttcaaggcgatagttgaggcgatcatgcaggcggctggcgcggccttgccagaactcgatgcgctctggcagcaggcggtacccgccccaatgctcggggcaatcgggttgagtgtcgctgaaacgctgctcggtggccttgagcaggtcgtgcagctcttcgcggtcacgaatgaccttgctctgcggcgacgcccaggcgcccaggcgactgcccagcgggcgcacctgataataagcattcgactcttgcggcgtgaccttgaccacccgcccctcgatgcgtacctgacgctctagggtcggccagaagaaggtcatggccgcaaacggccgcgccgcaagctgttcgcccttggcactctgatagttggtgaagaaggtaaaaccctgtgcatccaggcccttgagcaacaggatgcggcagtgcgggcgaccttcctggtcgaccgtggccagcgtcatggcattggcctccaccggtggctgttcggttttcaccgcatcgccaaaccattggtggaacaacgcaaacggctcgcctggggcttgcgcctcgctcaaaccgtcccgtgtgtagtcacggcgcatatcggccagtgcctgggtcatgcggctttatccttctggttcaacggatcagttttttgcctggtcgttcgttgcgggggcgtccgccttcggtgcagcctttttcgcggccggcttggcagcggcttttttcgcaactggcttggcggcggctttcttggctggagctttcttggctggagcggctttcttcgctgccggggtcggtacaggtgccggtgccgtttgcacggcgaccatctcggcaaccggtggtttgcccgagctgtatttgttcaacaacgccagcatggtggtgcgctgggtaaacatgatttccatacgacggttcaaggcgcggccctgggtgctgtcgttggcggcacgtggcatcaggtcacccatgccgcgcatcatcaggcggtcctgcttcaggccgctgaggctgaaaatcgaagcgatggactgcgcgcgctcgcgggtcaacgcctggctcaccggctcggcgccgttggtgtcgacgtggccgagcaccagcacggccgtcttcgggtcgccttcaaccgccttggcgacgcgggtgaacgggcccagggtcaccggcagcaacatcgccgggcgctttgggttgtaagagccgtctaccggcgcgatcacaaccagtacgttttcacgacgctccagttgcaggttgctgtccttgatggcggcacgcaggcgcggctcgtagtcgtccagccaggcttgggtgattttcgggtcaggcatcaccacgttggtgacatcgaccttggccagaggttttggcttgctttcaaacggccaccaccatttggtatcggtgtcagtcttggcgacagcaggcgcggcgtccggcgcagtggccggggttgcagccttgaggtcggctttcagatcggccttggcgtcggccgccttttcgtcagcgcttttggaagagaacggccaccagctggagccggtgtcagccttggcgaccggggcaggcgcggcggccggggctggagccggggcagcggcagcggtagcggtagcggtagccggtgcggcgggcttggcgccagcagccggggccgacggggcagcaggcttggcgtcggtttgggtcactgcgtccttggtagcagccttgtcaccgccaaatgaccaccagtgcccaccttcggcatcattttgtggagtttgtgcgcagccagtaatagtgaggcacagcgccagtgccaaggacttgttcgataacatgagatatccacaaaatgagaaaaaatcagggggtctggttgacccgttaaacagacgcttacagaacattaaagttacacaatttcgttcagcgccttcttatagttgcctttgtaacaaaaaaacgtgaaacagcaagcgctttacagacaatcggccaatattccgaccaacttctgtgcacgtgggtccataagtacataaggccccagtgtattagtcacgaaaccgaatgctacatcatgttccgggtcggcaaaccccaccgaaccaccggccccggggtgcccaaaagcacgtgggccaaggccatacgtggcattgggcaattgcggctgatccaacatgcaacccagcccgaaacgggtttgggtcaataaagttttatccggcccgatactgtgttcgcgcgtcaattgttcgagcatgtcgctttccagcaaactaccgtccaacaatccgctataaaaacccgccaggctgcgtgcattaccgtgaccatttgccgccggctgctgcatgcgtcgccattcgggcttattagtgctggtcagaatagacggtgggttggcaaatgcacgggtagtcattgccgcaggttcacgcatcattacttgcaataagcgttgtgccgcttcatcacccatattgcctttgctacgcgcaatatgagcaacgcgataaaactcttcgtccgccaggcccacatgaaagtccaggcccaatggccgcgcgactcgcgccacgatcgactctcccggcccgcgcccgtcggcacggcgcaacaactcgccgaccaaccagccataggtgatggcctcgtagccatgcccttcgcccggcgtccaccacggagcttcggccgccagcgtgtcgaccatcaatggccagtcgtacagcgcttcggtgggcagcatttcgcgaatcgcaggcaacccggcctgatggcacagcaactggcgcaacgtaatggcttctttgccggccgccgcgaattcaggccagtagtcggcgactggcgcgtcgagctttaacttgccctcggccaccaattgcaaggccgtgacggccgtaaaggtcttggtgcaggagaacaggttgacgatcgtgtcgctgtgccaggcctcggcaccgtccttgtcggcggtaccggcccacaggtcgacgacggtttcgccgccgatctggatgcacaacccggcgccacgctcctgcgggtcatcgaacaaggcggcgaatgcctcacgtaccgcttcgaactggagctcgtaatgaccctgaatctgcacctgatccgcctcggaaaacgctgtaagaaatggcggccattgttccagccattacgggttttgtgaacccgtcaaacatgaatcaatggccatttccagagtgcccgccggcatgcccggcgccctgccccgcacctttgccctcatgcccggccttgccgccttcactttcacgcaccgcgctggcagccttggctttttcggcttccttgcccaattgatcgaccgccgcaaggttgcttttacgcacgctgtcgacaaaaccctggaagggtacatcggtgatgccgaccaggccgaagtggccgttttcgccgtccagcaggcgcccggtcactggctggtcgaggtactgaaaccagtgcacaccgacaatcgacggctcggccatggcctgcttgaggaaagtgctgtacgccgcgctgcgatcttcttcgcgggccagttgcgtcacgccgccccagaacgggccacggtccgccgagccgaagttgaattcggtgatcagtaccggtttatccagcgcgcgcaaggcagcgaagtcatagccgtcctgcggtttgagggtgtacatattgaagctcaacacatcgcaatattgcgcgcacgacgccacggcttccggggtgctcacggcataacggccgcccagcaacagttggttcggcgcgtgccatttgagcgagtcggagatggtcttgaagtaggcgtcggcaaaggtcttctggaaatatttgaagtcggcttcgatttccggatgctcagggctcggcatcggcggctcgaaacccgggtcttccatcagttcccagcccgccaggtgaataccccaggctttcgacaggccgtcttcgttacggtatttgtcgcgcaattgcttgaggaacgcccgcttggccggtacgtcagtggtcatgcgcaaagtgccataagccagggcgtaacgggacttcggatcgtcgcccgggccggcccaggctagctcgttgtcggcaaagtagccaatcaaccacggatcatcccgatgatcacgcgcggcaatggccacggcccgttcggtggccatggcgaagcgcgggtcgaacgggtcaggcatgccgccccaccagtcggtgccggtgctgatgctggcgtaatcgccgacgatggacagcggcaaggtgtagggcacgcggtcagcggtggctaacccttcgtcgctccagttgcccacggtgttgaagccccaggcttgcaagcggtcgagggtgtgagtcacccagcgtttcgggtcgaaaccttcgccgccgtaggtgcgctgcaggttggcgccgtaaaagtcgtaccagcggcctacgttgaagccccggccctgatcggcgccattgccgccacggttgtcaccgctgccgtagtacttgtcgaacggctcgccggccttgggcaacgcggcgaacatccactcgcggcctgccacgtaggtttggttgttgtccggcgccacggtgttcacgccgagggaatagaacggatggccttccggcgtcaccaggtaccagcgaccgtcacgtttctcggtgcggaaaaaaccgctgacctcgaacgccgggcctttgttccagccgccgtattggtccagcgaagacttgtcacgctcagccagccagcccttgagctgttgttgctccttggtggcggcagccttgagttggtcgtcgctgctgactttttccggccagcgcgcacgggtggactgaccataggcatccaccagttcgctgtaagccgctttcataaccggttcaatgtcctgcacgccaaagcgctccagcaggatgctttgcgcggcattgggcttgatcatcgacagggtgaccgaagcaacctggctgcggtcgatttccccggcgctgctgcccagcaacacacgctggccatccacggtgattggcatcggcggccccgccttcatgccctggctcaatggcgaattggcttgtaacggaatcagcagcgtctgagccgggccggcgggcagatcgatgcggctgaccagcgtctcgccatccgtactctgcactttgacgtacaacgtcagcgcccagtccatggcgctctggatacgcaggctcatggcccccgactgcgaccagtcccaagtcccggcctgcgggctgagtaccaggctcggctcggcggccgggttgaaggtgatgcggcgcagcacttcgccttcgggggtttgttcggcgttgtattgcggcaggctggcgtcctgggtcgccaccttgaccacatcggcaggccgcacgaaattgaacagggtttgttgcccggcgggcgcagccatcaagggcgcggcgaacagcagggcaaaaagggcgggcagcgtgcgaatcatacgagcaaggttctcccaaacggccgatgaatggcctgatgacataaagcgttggcagtgagatagaccacgaagtgggcgaattcgcccacggtggctcaagaaatttcgcgcctgaacggcggcaaggcattgaggatcgccttgccgtagcgctgggtgaccaaacggcggtcgagcaaggtgatggtgccccggtcctgctcggtacgcagcaagcgcccgcaggcctgcaccagtttcagggacgcatccggcaccgaaatctccatgaacgggttcccaccccgcgcctcgatccattcggccagcgcggcctcgactgggtcatccggcaccgagaacgggatcttggcgatcaccacgtgctcacagtaagcgccgggcaagtccacgccttcggcgaagctggccagaccgaacagcacgctggaatccccgccatcgacgcgtgccttgtgtttgttcagggtttcctgcttggacaggttgccctggataaacacttgcttgcgccagtcgcggtcgagaccgtcgaacacgtcctgcatctgcttgcgcgacgagaacagcaccagggtgccccgcgagccttccaccaatgacggcaggtcacggatgatcgccgccgtgtgcgcgggcgcgtcccgtgggtcggccttgaggtccggcacccgcagcacgccggcatcggcgtgatggaacgggctcggcaccacggcggtgacggcttttttcggcaggccggcgcgcatgcgaaagcggtcgaaggtccccagtgcggtcagcgtcgccgaagtcaccaggcagccgtaagccacgttccacaggttgcgccgcagcatttccgccgcgaggatcgggctggcattgacctcgatatcaaacagcgcaccgctttccgacagcgtcagccaacgcgccatcggcgggttgtcttccgggtcttcgacggtaaaagcggtccacaactcccagttgccctgggagcgcgacaacaggctgccgaacagcggataccattcttcggcctggttgctggcgataccgatgttgacctcgccgtccatgccttccttgagcaggtcggtcaggcgcgtgaacaaatccgtcaggcgcgaaaagcctttcttcagctcgatgcccatttcgcgcatgtgctcggggatcaacccgccgacgaaacgatgacgtggccgttcacggccctccacgtcttcgccgggcttgaagtcggccacctgttcgcaggcgctgaacatgaattgttgctgggtcttgatctcccgtgccagctccggcacctgctcgatcaacttgccgaggtcgccgggcaacgggtgctgcgccagcagtttggtcaggttcttcgcggtggtttccagccagtcggcggtggagcgcaggcgcgtgtagtgggcgaagtggccgatggccttgtcaggcaggtgatggccttcgtcgaacacgtaaagggtgtcacgcgggtccggcaacaccgcgccgccgcccagggcgaggtcggccagcaccatatcgtggttggtgacaatcacgtcgaccttgcccatgccttcgcgggccttgtagaaggcgcactggccgaagttcgggcaatggcggttggtgcactggctgtggtcggtggtcaggcgcgcccagtcggcatcttcgagagcggtgggccaactgtcacggtcgccatcccatttattgccggcgagtttctcgatcatgctggtaaacagcttctggctgacctcatcgacctcgatcttgaagccttcttcttcgaacagcgaagccgtggcggtttgcgcgtggccttcctgcagcaagacgtcgagcttggacaggcacatatagcggccacggcccttggccagggcgaacgtgaagttcaagccgctgttgcgcatcaggtcgggcaagtctttgtagacgatctgctcttgcagggcgacggtggcggtggcaatcaccaggcgcttgccggcggccttggcggtcgggatggcggccaggctgtaagccacggttttaccggtaccggtgccggcttcaacggccacgaccgcaggctcaccttcgcggcggccttcgtcgtcggtgtcgatatccccgaggaccttggccacttcggcgatcatcaggcgttggccgtagcgcggtttcaagctcttggcttcgagaaaacgcgagtaggcaccctggatcgtggttttgagttcagtgctgatcatggatagtcgggcgcaaaaaacgctggataaattttcagtggttcggatcggcggctatcataccccgctaatgaatcccgcgcagaacggagtaccgcaatgaccgtgtttagccttgtttataccctgcatgtactggcagccctcatctgggtcggcggcatgtttttcgcctggatgatcctgcgccccgccgccggggcggcacttgagggccctgaccggctcaagttgtgggccaatgtgtttcagcgtttttttgtgtgggtctgggtggcggtgctggttttgccgatcagcggtgtcggcctgctgcaattgcgtttcagcgggtttgaaaccgcgccgcgttatgtgcaggtaatgatgggcttgtatctggtgatgacggcgctgtttatccgcatccaggcgttgaagttcccgcagttgcgcacggcggtggcggctgaagactggccggcaggtgcggcggtgctggggcagattcgtaagttggtggggatcaatctgattgtagggttggtggtcgtggcgattgcttcggctcggccgatgttctgaggatgtttttcagggcctcatcgcgggcaagcccggctcccacaggttggaatgcattccaatgtgggagccgggcttgcccgcgatgacgtcagggcaaacgcatcaaagccgctggatggtcacagcacccgcaggcccggcaggccccggctgcccttccagccctgggcgccccttctggccgccatcggcgcggtacaccaggcaccccttggactgcccgcctttaccgggcttgcccgccgtaccggccaacccaccggcgccgccatcgacccagaccttgatctgttcagccgggaagctttgcggcagctcgacacgcacctgcgcacccgccgcgcccggcaggccatcgccgccgttatcgccattggcgccgcgtccggctgagccccaggtgcaacccgggtccacgccgttggcgccgtccagccccgcataaccttgggcaccggcgccgccacgggcgtctaccgacagttcatcggcagtcaattcattgatgcgcaacgtcaggtcgcgcccagccttggccgggcgttcgtgggtaccaggcgctccgcgcgaggtgatctggctgccatgttccaactgcgcatggcgcacctgcaactgcaacgcggtattgccgggcacgatggtgatgcgggcttcgcgccccaggtgcagctcatccaccgtcacctggctgatgttggccggaatcagcaatgtgccgtaatccgccacgtccaggcgttcaagttgcaggacgctggtgctgttgggcaagcgcatcagcgagttgctttcgacgctgacgttctgcgccagagcaatggggctgaccaacagggccaacagaaaaaccttacgcatgaccggcctccttgtttgtttcattaacggctgcaggcgccgacaggctccgcacatggaacatacccaccaggaggatctgcaaacggtcacgccagggatgggcacggtgtttcacgctgctgttgaacaacagcaactccagaagatgggtaagcaacaacaggctaccggccagattgaccaacagatgaaacgggttgaccagtggctggagcagattgaccaccaccacgacccaaaacaacaacgtcagaaacttccccagcccccaaaacaccttcatgccacatgctcccctgcctgtttttctttgggcgcacagtaacgacttctacaggcgatttgccagtgaaggatgaaaaaacttgataaagggcaggtttgccgacggtttcggcgaggatcgccagcgatgcccccgtggctcacacgggggcaagggctgtcagcggttgattttgatttccacgcgacggttcaatgcgcgcccctcagccgttttgttatcggccaccggctggctttcgcccgcgccgaccacagacacaaagttgctgcgcggcacgcccgcaccgatcagataatcggtcaccgagtgtgcacgtttttccgagagtttctggttgtaggcgtctttgccgacgctgtcggtgtgcccgctgacccgcagttgcgcgcccggggcttcctgtttcaagcgggtggcgatggtgtcgagtttggttttgtccgccgccgtcaacttggccgagtcgaactggaagtgcacatcgcgaatcacgatggtttcttccttgaccacaaccacctcctcaaccaccgccgccggcggcgccggtgggcaaccgttggcatcgacctgcacgcctttgggcgtgcccgggcacttgtcgcggctgtccggcacgccatcaccgtcttcgtcgccatcgccgtgaacccagcaataggcgccagccatgccgccgatcagcagcgcgccgtagcctgcgtaggccgagctttcagtggcgccaatcgcggcgcccgtcacaccacccacggctgcacaggtgggccaatcggttttttgcaaacctgcgcaacctgtcaatactccggttagcagaaccaagggtagagctgtccgcatgatgctcatgtgatttctcctgagggtatcggcgggggccgatgggtggagtaaagacggctcttttcatctgcgccagtacgccacacccccggttttattgaggattaccgccctccgaggacttttcgcagccgcccgctctaggcccgcacgctcagccgcgctagtctctacggtcctgatgtgaggatctgtgatgaccgctggtatttcttcccgtacacctcagcaagccttggccgccttgctcgacctgcaccagccaaaacgcctgcttttattgggtgccagccaatttccggcattggaggcgtttcaagcagagcactccgacaccgaagtggctatcgccccgcccgggccgctgcccgcggagttggccgcgcagcgttttgacctggcgctggtggtcgactgcctggagcacctgtcaaaaccgcaaggcctgaccctgctcggcggtatccgcaacctgaatgccagccgcattgcagtgctggtggacctgaccgcctgcggctggaaggaaaccgacttcttctccctggccctgcaagccggcgagcgcttccagcgcgacgagcaggttctgacgctgtttacctatgatctgcttgactataagcaagtgcccgactggctcaacgcccgcttctgggccaacccggaaaacttcggaaagtattggtggtaacccgatgagtacgtccatttgcccctgcggcagcggcaacctgctggatgcctgctgcggccattatcacgccggccacccggcaccctgcgccaccgcgctgatgcgttcacgctacagcgcctatgtgctgggcctggtggactatctggttgccaccacgttgcccgcgcaacaggcgggtcttgaccgcgccgccatcggcgcctggagtgcacagagcacctggctcggccttgcggtagaaagctccgaagtgttcggcggccagccggaacacgccttcgtgacgtttaccgcgcgttggcacgacagcaccggcgaacacagccaccgtgagcagtcttctttcgtacagaacgagggccgttggtacttcatcgacccgacggttgaggtgaaggccgggcgcaatgatgtatgtttgtgcggcagcgggcagaagttcaagaagtgctgttccagctacctctaaccacctgacgggaaaacgccatgcttcggatgtactgtttgatgctggcgttgaccctgggcttgaccggctgcgcctcctggtttgaagacgatgccccgccgccccatgtgtcgctggtgaaagtcgaagtcgtacgcgcgaagttgctcgagcagaaattcaaactgtggtttcgcgtggacaaccgtgacgacgaagacctgacggttcgcggcctgatctacaaggtcagcctcggcgactttgtgctgaccgaaggcgagtccaacgaatggctgacggtgccgccgcgcagccatgcttttttccgtgtctcggtgcgcaccaacctctggccgcagattcgtgatgtggtgcagatgctgaaaaatcccgacaagcccgtgccgtatcgcctggagggcgagctgaaaaccggattattcatcggtaatgacgtgcaggtgaaccacaatggcgagataatccccggcgattttattccggagcgacatcgatgaaccagcaaccccatgtccatggtcccgactgtaaccacgatcacgatcaccatgatcacgaccacggccatgtccacggcccgaactgcggccacgctcaccaggagccggtgcgcaacgccttgaaggacgttggccgcaacgatccttgcccgtgcggcagcgcgaagaaattcaagaagtgccacggggcttgatgccctgacacggtcagtgtgggagctggcttgcctgcgatggcatcaacccggagtgcctgatgaaccgagttgtctgcatcgcaggcaagccagctcccacattggattgcgtttcaaattacagcttgcgttgaaataacagctccacctcaagcccaccgccctcgcgattactcaagctcaaccgcccttcatgcgcccgcgcaatggtgtgcgcaatactcaatcccaacccgtaaccgcctgtctcggcattgcgtgagccttccacccggtagaacggctccattacctgttccagctgtgcctcgggaatccccggcccgcggtcgctgatcacgatcttcaagctatccgcccggtcctccacccgcaccaccacctcactgccatagcgcactgcgttctccagcaggttctgcacgcagcgcttcaagctgcgcgcgtaccccggcaacggctgccgggcgcggccgacgatggtgacgctgttgcccacatcctccagatccgcctgcaggctttgcagcaaggcattgatgtcgatgttctgccgcgtttcgttgatttcgccgctgctgacgaaatccagcgtgctggagaccatgtgttccatttcctccagatcgctgcgaaaacgctctttggttcggttgtcttcgagcatttcggtgcgcaggcgcaggcgtgtgatcggagagcgcaggtcgtgggaaatcgccgcgagaaaccgcgtgcgctcggcgatgttggcgatcagccgctgctgcatcgcattaaaagcctgggcggcccggcgcacttcggtggggccgtccaccgacagtggcgggcgctggatgtcccggcccaacgcttcggcggccttggccaaggcgttcaacgggcgaatcgccaggcgtaccgcgaccagtgcgatcaccaccaacaccagcacccgcagtaaatagatgcgcatcacgtagtcgaacagcaaatccagcggcgaggtactggtccagccctgctcttcgctggcgtccacctgcaaccagcgcccatcgggcaggcgcaggtcaatcaggaattggcccaccaccggtttggagccgagcaaggtcgagaggccagcggtttgcccttcgccgtccaccagtgacagacgcaacaaaatcagggtttgcgcatagccggttttctccgacagcacctttttgatcaggcgctcggtgggccggtcactgtcggtgagggtgctgggcgtactgctggcctggtcgctcagggtcagttgaaagtgcggcgcattgagcagtttgatcagttgatcagcctgctgcgggtcgctgtgcaccagccgcaccacatccgccagccgcgtggcgatcagccgcgcggggatttccagcacctgcccatggcgccggtcgtaccagatgctgctggtcagcgcctgggccgcgagcatgccgctgaccagaatcagcaccagccgcccgaacagcgacttgggcagcagcctcacgagcccaatgccacgtcgtcggcggtgagcatgtaaccctcgttgcgcacggtcttgatcagcccggccgggagttgcgagcgcaggcggctgacgcacacgtcgatggagcggtcgaacggcgtgctgtccttgtcgaacacgtggttgagcagaaagtcgcggctcaacgggcgattcgggtgctgcaataacaggcgcaacacgcggtaatccgaattacccaggctgaccaccacgccttcgggtgtcagcaattgccgcgctcgcgtgtcgagttgccagccggcgaagcgaatgctcggcgcctcatccagccgtgcgcggtcgggaaagctttgcacccggcgcaacaccaccttgatccgcactagcaactcgcgcgggtcgaagggtttgggcaggtagtcgtcggcgccgatttccaggccgacgatgcgatcgatcaacgaccccttggccgtgagcatcaccaccggcgtgttggaactcacgcgcagttcgcggcacaggctcaggccgtcttcgccgggcagcatcaggtcgagcacgatcaggtcaatcacattcagtgccaggcggcggcgcatttccttgccgtcagcggcggtggacacctgaaaaccggcgtcactgaggtagtcgcagagcagttggcggatttgcgggtcgtcatcaacgatcagcaggtggtcaagcttggccatgggcggtcaatccgaaaactcaaaacgcaggatctagccgaaagttcggccagcaggtcgggcaaatgtaatggaatgttgtaggaaaccataatcacgcatcagcgatacaaagccagggtatggcaggggaaatcgctctttagactaccgaacctaaatgagagtaattgtaatttagactcggatcgctgcccatgtcatctcccacgcctcaccgccacacgctgaatacgaccctggcgccgatgttcggttttctcgctgccggcagcgtcgcgccgaccgcctgggccgacacccacgccaccgcgccgaatgattcggtgctgagcctgccggaaatcaaggtcgacggcgaagccacctccacctttaaagtggaccgcgtaacctcggccaaaatcagccagccactgctcgatgccccgcaaagcgtcaccatcgtgccgcagcaggtactcaaggagcagaacgcacagaccttgcaggaagtgttgcgcaacgtgccgggcatcaccttcatgtctggcgagggaaatttgggctggggtgacctgttttcgattcgcggtttctcatccgagcaaagcctgaccgttgatggcgtgcgtgacgcgggcatgtcgacgcgcaccgacaccttcaacctgcaacaggccgaggtgttcaagggcaccggttccatagaatccggcgtgtctgccgtgggcggcagcgtcaacctggtgagcaaagaagcacacttgggcgacgccaacaaagtcgccgccggcatcggcaccgacagctaccgccgcctcactgccgacctgaacaaacagatcaacgacaccacggccgtgcgcatcaacctgatgaagcactacaaccaggtcgccgagcgcgacgacgtggactacgaccgctggggcatcgcgacgtccttcggttttggcctgggcaccgacacgcggtttttcgtcgacaccttctaccagaaagacaccaacaccccggacggtggcgtgccgatccagcggggtacagacggtcaccgcatgcccggcgtgtcgcgttcgaactggtacggcgactccagcctctacacccagcagaacgaaaccacctcgctgaccgcacgtttcgagcatgacttcgactggaacgacgcccacctgcgcaaccagacccgttgggaacgcagcgacaatttcgcggtgctgtccccggcacgcttcttcgccgcaggcgccaacggcaagaaaacctgcaccggcacccgctgtgcgaccctgggctacaccggcgtaggcccaatcagccaagtgcccggcagcacggtaaacgcctacaccgactacgtgaacaacagcaacaccgcctacggcatcctgcgcggcagcgatttcggtttgtccaagcgctacaccatcctcgataaccagaccgacttcagcttcgcattcaacaccggcagcctgcagcactcgatcgtctcgggcctggagttctaccacgagacctacggcggcctgaaacgcaacgccgaagtaccggctggcgacatgttcttcaacatgaacgaccccagccacagcttcgccagcacctacgtgaccaagggcgaaggcgacccgcgttcaatcgtcgacaacgccggcatctacctgggcgacaccgtcaccctcaacgagcaatggcaggtcctcggttcgctgcgctacgacaactggcgcgcccagaccacccagcgtggccaggctgacatcagcagcaccgacggcgccgtcagcggtcgcgtcggcgcggtgttcaagccgttgccgaacggcagcatctacgtgtcttacagcgaggcggcgcaaccgtcggcgctgggtgcgtccaccaacaaccagatcttcggttcggccaccaccagcaactacagcccggccaaatcgaaaacctacgagatgggcaccaagtgggacatcgccgacgacatgcttaatgtcaccgcggcgatctttcgcaccgaactggacaacgcctgggaataccaggacggcgaagctgcgccggtgcgcgccctgcccgccaagcgcgtggacggcgtagagcttggcctgcaaggcaatatcacgccgcgctggaccacttacgccggtttctcggcgctcaagagcacccagaccaagggcatcaacaaaggcagcgaagccaagaacgtccccgacctgaccgccaacctgtggaccacctacgccgtcaccgacgacctgagcctgagctacggcgagcaatacgtgggccgtcgccgctacaccgacaacaaatatgtcggcggtttgaacaacaacagcagttactccaacgggccgtccggggttaacgccatctacgtgcgtgacaacgaaaaagcccccggctactggctgagcaacgtggccgcgcaatacaaggtgaacaaggccaccacggtcaacctcaacctgaacaacgtgttcaacaaattctattacagccagatcggcgcatccctcgacggcttccagctgtacggcatccccggcgcagggcgcaccctcacggccagcgtcgattatgaattctgatgttccctcacccggagtcctttccatgttcaaaccccgtaacgtgttcaagctcggcgtgctgttcgccgcgctggtgctcggccacgccgaaaccgccgccgcccatgaagtcaccgacgtactgggccgcaaggtcgaggtgaaggacgacgtcaaacgcgtggtgctcggcgaaggccggttgatttccgcgtttgccctgctcgacaaggaggcgccgttccagcgcatcgtcggctggcagaacgatttgaaactgctcgaccagcacacctacaacgcctatgtggcgaaatttcccacggtgaaagacatcccgctgatcggccaggcgtcggaacaaagcgtcagcgccgaggaaattctctcgcttaaacctgacctcgcggtgttcagcatctcgggccacggcccgaccgaacacagcccggtggctgacgtgctggccaaagccggcatcccggtgctgttcgtggattttcgcatcaacccggtacagggcacccacaccagcatgcaggcgctgggtgaggcgttgggccgtgaagcccaggccaaggcgttcctgagtttctatgaccagcacatcaaggtcattaccgacgccgtcgccaccctgccggcgggctcacgcccgagcgtgttcctcgaactgctggccggcgcctggcaagcaccggggcacaccaccggcaaaagcggtatgggcgaagtgatcaagctggtcggtgggcgcaacatcgccgcagacgtggtgccgggggcgctcggcgatatcagtgtcgagtacgcgctgaaggctgatccggatgtgtacgtggccaccggcaaccataaaccagggctgattctgggtgcaggcgtgagtaatgaagacgcccgtgaagcgtttgaccgcgtgctggcccgcccggaattcgccaacctgcgtgccatccgcgagggcaatgcccacggcctgtggcatgacttctacaactcgccgtacaacctgctggcgattgaagcattggccaaatgggtgcatccggagttgttcgccaagctggatccgcaggcgaccatggagcagatcaacagccagttcctggggatgccgctgcagggtgcttattggatagacgccaaagccaagtaaccccggcctccctgagggaatgcagtcagtgtgggagctggcttgcctgcgatgacggaatttcagccaccctttcagtgactgacccaccgccatcgcaggcaagccagctcccacattgaccgtgttccttcagggatttcattattttcaagaatgcgaatcccatgaccactcaaaccctcgacctcgccagcgccacccacggctaccgccgtttgctggcgcggcgtgcctggctgctggcgttgctcggcaccgcgctggtctgcgccattctggtggacctcgccagcggcccgtccggcatgggcctgctggcgctgctcgacggcattgtgcatccgtcccacctgagcgccactgaccaggtgatcatctggaacgtgcgcctgccctacgcactgatggcggtgctggtcggttgcgcgctgtcgctggccggggccgagatgcaggcgattttgaataacccgctggccagcccgttcaccctcggcgtgtcctcggcggcagcgctgggtgcttcgctggtcatcgtgtttccggtgaccacactgtgggtgtcggccaacacggcgatttccatctcggcctttatcttcgccgccgcctcggtgtttttgctgcaagccatgtcacgcctgcgtggcgccggggtcgagagcctggtgttgttcggtatcgcgctggtgttcagttgcaatgccgtggtggccttgttgcagttggtcgccaccgaagacgtgctgcaacaactggtgttctggaccctgggcagtgtgacccgggccaattgggacaaactcggcattctcgcctttgtggtcgccgtggtgatgccgttttctttcaccgccgccccgcgcctgaccctgctgcgcatgggcgaagaccgcgcgcaaagcttcggcgtggacgtgaagcgcctgcggtttttctcgttgctgcgcatcagcctgttgtccgctaccgccgtggcatttgtaggcaccatcggttttatcggcctggtcggcccgcatatcgcacggattctggtgggtgaagaccaacgtttcctgctgccggccagcgccttgaccggcgccttgctgctgtcgctgtcgtcgattgccagcaaactgatcatgcccggcgtgatcgtgccggtgggcatcgtcaccgcgctggtgggcgtgccgatttttgtggtgctggtgttcaagcgtgggaggcagttatgagtgcaggtttatcggtacaccacgccaacgtcagctacgggcggcggcagattgtgcatgacctgagcatgcccaccctgccccacggcagcctgaccgccttgatcggcccgaatggcgcgggtaaatccacgttgctgcgcgccgtggccgggctggaaaagatgcaaggcgttgtgcgcctcggcgaccttgacctgtcggccatgtccatcggcgagcgtgcgcggcgcgtcacttacatgccgcaaaatctccccccggggctgagcctcagtgtgatggaaagcgtgatcgccgccctgcgcgtggcagacgtcgatggcatcccgctgtcgagtgacgcctgcctgcgtgaaggcttcgaggcgttgcagcgcatcggcatcacgcatttggccgaccaactgttaagcacgctttccggcggccagcgccaactggtcagcctcgcccaactcatcgcgcgccgcccgcaagtgatgctgctggacgaacccaccagcgctctggacctcaattaccaattgaaagtcatggactgcgtgcgcgctctggtgcgcgagcacaacctgattgccgtggtggtgttgcacgacatcaacctcgccgcacgttttgccgaccatatcgccgtactgcgcgaaggccgcttgtatgccagcggcaaagccgatgcggtgctcgacccgctgatgttcgccgaggtgtaccgcgtacgagcacgtatcgagcgctgctcgcagcagtcgttgcaggtgctggtggacggtgctgtgtgaatggcttctaagggtatgcacaaatgtttcattgaattttcgtcggtggaacattacctatagcggcaggcattcgctcaagcatcaccacctttggagagcttcatgatcgacctgtattactggactacccccaacggccacaaagtatcgttgttcctggaagaagccgggctgccctacaaggtgcacccaatcaacatcggccagggcgaccagttcaagccagacttcctgaagatcgctcccaacaaccgtattccggccatcgtcgatcagaacccgaccgacggcggcgcgccgatttcgctgttcgaatccggcgccatcttgctgtacctcgcggaaaaaaccggccagttcatcccgcaagacctgcgcggtcgccaggaagccctgcaatggctgttctggcaaatgggcggtttggggccgatggccggccagaaccatcacttcagcctgttcgcaccggagaaaatcccctacgcgatcaagcgttacgtggatgaaaccgcgcgcttgtatggcgtgctggaccgtcgcctggccgatcgcccgttcgtggccggcgaggcctacagcattgccgacatggccatctacccgtggattgcttcccacgaacgccagagccagcgcctggaagacttcccacacgtgcagcgctggttcactagcatcaaggagcggccggccactgtccgcgcctatgaactggtgcaaaaggtgaacccgcccaaagccagctcccacacaagccagctcccacattgaacgcccctcggctcaaaaattgacaaaactcccgcttgcgtcgtttcgccgcgctcactaacgtagcgcctttactgacgctacccccccgcaggagctttgccatggcctcgccagccctctcacattttcttccccggttcggcgttgccgcggcagtggccagtgcattaagcctggccggttgccagctccagagcacccaggacaccctgccaccggtcgccggtgtgcagccgatcaaaggcctggcacagaatgtgtcggtgcgccgcaatgcccaaggcatgccgctgatcgaaagcaacaccttccacgacgcgctgttcagcctcggttatgtgcacgccagcgaccgcatcacgcagatggtcaccctgcgcctgctggcccagggccgcctggcagaaatgtccggccctgaagtgctcgacgtcgaccgcttcatgcgcgccgtcaacctgaaaaaaagcgccggcgagctgtataacgcctccagcccgcgcctcaagcgcttctttgaagtgtatgcgcggggcgtcaacgcctacctgttccgctaccgcgacaagctgccgccggacctggcccagaccggctacaagcccgagtactggaagccggaagattcggcgctgctgttctgcctgctgaatttcagcgagtcgagcaacttgcaggaagaactgtcgtcgctggtgctggcgcagaaagtcggtgtcgacaaactcgcctggctcacccccagcgcaccggatgagccggttccgctggaagaaaccgaaaaactcaaaggcgtgaacctcggccagatcaccggcctggccgggttggaagcggtaggccagcaactcaacagcctcaacgcgctggccgtcaccacatcaagcaactgggccatcggcccgcagcgcagccgcagcggcaaaagcctgttggccagcgaccttgcagccgcgccacaagcgccgtcgccgtggaactacgtacagattcgcgccccgaaataccaagccgtcggcgcctcgatcgccggtttgccgacgctgctgtccggcttcaacggcaaagtggcgtggagcatgagctcggtcaaaggcgacacccaggacctgttcctggaaaaggtcaaacgccagggcagcgcgctgtactacgaaaacaacggaaaatggctgccggccggtgtgcgtaacgaaaccttcttctccaagggccagcggccgcttcgcgaagtggtgtacgaaacccgccacggcgccctgctcaacagcagccaggccctgaccagcgggttcggcctggccctgcaaaccgccgatttcaaggacgacaagagcctggacgcgttcttcgacttgtcccgcgcgcaaaacgcgggcaaggcctcggacgcgacccgcgaaatccgcgccattgccctgaacatgatctttgccgacgccaccaacatcggctggcaagtcaccggccgttttcccaaccgccgtgaaggcgaaggcctgctgccgtcgccgggctgggatgcacgctttgattgggacggctacgccgacgccatgctgcacccctacgaccaggacccggcccaaggctggatcggcaccgccaaccagcgcaccgccccgcgcggctacggcatgcagttgtccaactcgtgggacgcgccggagcgcagtgagcgcttggcgcaactggcgaatgccggcaagcacgacagccgcagcatgatcgccatgcagtacgaccagaccaccacgttcgccgccaaactcaagaccatgttccaggcgccgggcatggcccagccgctgaagcaggcgattgacgcactgccggccgccgaggcaggcaaggcacgcgaggcgctgagccgcctgatggcctttgatggccggctcgtatcgacctccgctgacgctgcaatctacgaactgttcctgcaggaaagcgccaaacaaatcttcctcgacaagctcggcccggacaacagcgccagctggaaagcctttgtcagcaatggcggcctgtcctactccgccaccgccgaccatttgctgggccgcgaagacagcccgttctgggatgactcgcgcacaccgcagaaagaagacaaacccgccatcctcgcccgcagcctcgcggccgcgatcaccgctggcgacagccagttgggcagcgatcacaaggcctggcagtggggcaagctgcacaccaccacctggaaaggcgccaatggccaagtgatccgcggcccgtttgccagcggcggtgaccacaacaccctgaacccggcgccgtacagctggggccaggacttcgccaccacccaggtgccggcgttgcgcatgatcgtcgacttcggcctcgccgaaccgatgaccggccagggtggcaccggccaatccggcaacccggccagcccgaactatgccaatggcatcgacccgtcgctcaaggcgcaatacctgagcttcccgatgcagccgcagaactttgacaaggcgtatgggaaaacccgcttgacccttacccccggcaagtaacccggtttctcgctgaagaaaccaaatccaaatgtgggagcgggcttgctcgctcccacagttgctttgcatgcattcagatagaacttctgcgttgcgccccgcctcctaactgataagcccattgccccggcacgcccatggaccttgtcatcgcccggcccgaaggcctctattgccccgccggtgatttctacatcgacccctggcgccccgtcgaacgctcggtcatcacccacgcccacggcgaccatgcccgtaccggcaacgaacattacctggcggccgctcccggcgaaggcatcctgcgttcgcgcctgggccaggacatcaacctgcaaaccctggcctacggcgaaaaactgctgcaccacggcgtcaccttgagctttcaccccgctggccatgtgctcggctcggcgcaagtgcgcctggaataccaaggcgaagtctgggtcgcgtccggcgactacaaagtcgagcccgatggcacctgcgcgcctttcgagccggtgcgttgccacacctttatcaccgaatccaccttcggcctgccgatctaccgctggcaaccccaggcgcagatttttgccgggattaatgattggtggcagggcaatatcgcggctggcaaagccagcgtgttgttctgttactcctttggcaaagcccagcgcatcctgcatggcatcgacgccagcatcggcccgatcctcagccacggcgccgtcgagcccctgaaccgggtgtaccgcgaagccggcatctacattcccgaaaccctctacgctggcgacttcaaaaaaaccgacccactgttgcgccaggcactgatcatcgcgcccccctctgccggtggcagcagctggatcaaacgctttggcgactacagcgatgccttcgccagcggctggatgcgcctgcgcggcacccgccggcggcgcggggtggaccggggtttcgtgctgtcggaccacgccgattggccgggcctgttgtgggccatcgaacaaaccggcgccgaacgggtgatggtcacccacggctccgtcggcgttctggtgcgccacctgcgggaaaaaggcctggacgcccaaggcttcaccaccgaatacggcgatgacgaagaagaggccacggcatgaaggccttcgccgagctgtacgctaacctagacgccaccacgtccagcaatgccaagctcgcggcgctgcaggcttacttccggcaagcaccaccggaagacgctgcatgggcggtgtactttttatccggcgggcggccccgccaactggtgccgacgcgcctgttaagggacatggccaccgacgcgtccggcatcgagccctggctgttcgaggagagctatcaatcggtgggcgacctggctgagaccatttccctgctgttaccggaatccacctacacctcagaggacggcctggccgtgtggctggaggaaaaactcctgcccttgcgcggcctgccacctctggagctggcggcgcgcttgcccgcgttgtgggcgcaactggaccaacccagcctgatggtatgcatcaagctgatcaccggcagctttcgcgtgggcgtgtcgaaactgctggtcacccgcgccctcgccgccatggcggacctcgacagcaaacgcgtggcccaacggttggtgggctacaccgacttgtccaatcgcccgacagctgagggctacctcaagctgatcgctgccgaatcgtctgacgaacacgcgcaacgcggcgggcagccttatccgttttttctggcccacgggctggcgcaaccggtggagcaattcgacgccctgctgggttcgcctgccgactggcaggtggagtggaagtgggacggcatacgcgcacagctggtcaagcgcgaaggccggctgtggatctggtcgcgcggtgaggaattggtgaccgaacgtttccccgaactgcatagcctggttagtggcttgcccgacgggacagtgatcgacggcgaaatcgtggtgtggaaaggctcggtgcaacccttcgccctgctgcaacagcgtattggccgtaaaaccttgagcaaaaaagtcctcgacgatgcgccggtcgccgtcctcgcctatgacttgctcgagcatcagggcgatgactggcgcagccacgctcaagccgaacgccgcgcccaacttgagcaggtgattgcgcaatgcaacaacccgcagttgctgccatcgcccgtgctgacagccaccacgtgggcggaactggccgaacaacgcgaagcctcccgcagcctcggcgtggaaggcatgatgctcaaggcacgcgacgggctgtatggcgtgggccgcaccaaggacatgggcgtgtggtggaagtggaaagtcgacccgttcagcatcgacgcggtgctgatctacgcccagcgcggccatggccggcgcgccagcctgtatagcgactacacctttgcggtatgggatgggccgctgggcactgaacgctcgctggtgcctttcgccaaggcgtattccgggctgactgatgaagagatgcgcaaggtcgatgcgattgtgcgcaaaaccacggtggaaaagttcggtccggtcagcagtgtgacgccgagcatggtgtttgagctggggtttgaggggatcgccctgtccaagcgccacaagagcgggattgcggtgcggtttccgcggatgttgcggtggcggcaggataagacggtggaggaagctgacaacctcgccacactgcaagacttgttggcctgacctctccctcccaaacactgcaaatccatgtgggagctggcttgcctgcgatggcggtgggtcagacacagagatttggcggctccaccgctatcgcaggcaagccagctcccacatgtgcaatccgagtcttgatccgaaatggtgcattgaaaaaacaatgcccattttcgggcatctcctacactcagaacgccctcatcccaccttttaaaacactcattcggaactatggtgcagaaattgctacttgagatccgtctgacaccgttcagtaacagtcctaaacgcgccacaagcgcttatcttggtttccagggattacataatgaaaaaagcattgctgaccctttctgcactggctctgtgcatggctgcgggtgtcgctacagccaaggaatacaaggaattgcgttttggtgtcgatccttcctacgcgccgttcgaatccaaggccgctgatggcagcctggtgggcttcgatatcgacctgggcaatgcgatctgcgccgagctgaaagtgaagtgcaagtgggtcgaaagtgacttcgacggcatgattccaggcctcaacgccaacaagttcgacggcgtgatttcgtcgatgaccgtgaccgaagcccgtgaaaaggcgatcgacttctccagcgagctgttctccggcccgacgtccctggtgttcaaaaaaggcgcgaactactccacgcctgagtcgctgaagggcaaatcggtcggctacgagcaaggcaccattcaggaagcctacgccaaagccgtactggacaaagccggtgtgaccaccaaggcctatgccaaccaggaccaggtttatgctgacctgacctcgggccgcctggacgcttcggtacaagacatgctgcaagccgaactgggctttttgaagtcgccagctggcgctgactacgaagtcagcaaggcaattgacgacccactgctgccagccaaaacggcggtcggtatcaaaaaaggtaacaaagacctcaaggccttgctcgataaaggtatcaaagcgttacacgatgatggcacctacgccaccatccagaagaaacacttcggcgatctgaacctctacagcggtaaataacaccctggcgcccaccggtttgcggtgggcgcttttttatcgccattaggtcctgaattcatgtttgaagatcttttgcaaaccctggggctgggtgccttcagcttgaaggggttcggcccgctattgctgcaaggtacctggatgaccgtgaagctggcggtcgcctccctggctgtcagcgtcctgctgggcctgctcggcgccagcgccaaactctccagcgtggccctgatccgcattccggcgcagatttacaccaccctgattcgcggcatacctgacttggtgctgatgctgctgattttctacagcctgcaaatctggctgactggccttaccgattttatggaatgggactacatcgagatcgacccattcagcgccggggttatcaccctgggcttcatttacggtgcgtatttcaccgagacgtttcgcggcgcgatcctcgccgtgccccgtggccagctggaagcggccaccgcctacggcctcaaacgcgggcaacggtttcgctacgtgacgttcccgcaaatgatgcgcttcgcgttgccgggcattaacaacaactggtgtgtgatgctcaaggccacagcactggtgtcgatcatcggcttggccgacctggtcaaggcggcccaggatgccggcaagagtacttaccaactgttctttttcctggtgctcgccgcgttgatctacctggtgattaccagcgcatccaacgtcgtcctgcgctggcttgaacgccgctactccgctgggtcccgggaggccgtgcgatgatcgaacttctgcagcaatactggcggcccttcctgtacagcgacggccaacacatcactgggcttgcgatgacgatgtggctgctcagcgcctcgatcttcattggttttctggtttcgatcccgctgtccatcgcccgcgtttcacgcaagttctgggtacgttggccggtgcagttctacacctacctgtttcgtggcacaccgctctatattcagttgctgatctgctacaccggcatctacagcatcgcggccgtgcgtgcgcagccggtgctggacgcgttctttcgcgatgcaatgaactgcaccatcctggccttcgccctgaacacctgcgcctacaccaccgagattttcgccggtgcgatccgcagcatggcccacggcgaagtcgaagccgccaaggcctacggcctgaccggctggaagttgtatgcctacgtgatcatgccctcggccctgcgccgctcgttgccctactacagcaacgaagtgatcctgatgctgcactcgaccaccgtggcctttaccgcgacggtgccggacatcctcaaagtggcccgggacgccaactcggcgacctacatgacctttcaatcattcggcatcgctgcgttgatctacctgaccgtgacctttgccctggtcggcctgtttcgcctggcggagcgccgctggctggcctttctcgggccgagccattaaggagtttttatgcgtcatcaggtgcatgaactgatcgcgcccgtgccaggcacggcgcggcagattcacagtttccacttcggcccggagctggctgaaggcaaaatctacatccagtcgtcgctgcacgccgacgagctgccgggcatgttggtcgcctggcatttgaaggtgcgcctggcggagctggcagcagccggccgcctgcacagcgaaatcgtgctggtgcccatcgccaacccggtagggctggagcaggtgttgatggacatccctctgggccgctacgagctggaaagcgggcaaaacttcaaccgcaagtttgtcgacctcagtgacgaagtgggcaatcaggtcgagggtttgctcggcgatgacccacagcacaacgttgagctgatccgcaccgcactggtcagcgccctcgcagcgcaaacggccgacacgcaactgcaatcccagcgcctggtgctgcagcgcctggcgtgtgacgccgacatggtgctcgacctgcattgcgatttcgaagccgtggcgcacctgtacaccacgcccgaggcctggccgcaggtggaaccgctggcgcgttatatcggctcggaggccaatttgctggcgaccgattccggcgggcagtcgttcgatgagtgtttcacgctggtgtggtggcaattgcagcagcgtttcgccgagcgcttcccgattcccatgggcagcttttcggtgaccgtcgagctgcgtggccagggcgacgtcaaccacggcctggcggccctggattgccaggcgatcatcgattacctgatccacttcggcgcgatagcaggcgaggcggcgccacagcccgcgctgccctacccggccacaccgctggcgggcgtcgagccggtgaccacgccggttggcgggctgctggtgttcagcgccctgccgggggaatacctgcaagccgggcaactgatcgccgaaatcatcgaccccattactgaccgcgtaacgcccgtgcattgccagaatgccggactgctctacgcccgttcgctgcgccgcatggccactgccgggatggtcatcagccatgtcgcaggtctagaggcctaccgcagcggctacctactttcgccttgaggatgcacgccccatgtacaaattgaccgttgaaggcctgcataaaagctatggcgacaatgaagtgctcaaaggtgtctcgctcaaggccaagaccggtgacgtgatcagcctgatcggcgccagcggctcgggcaaaagcacctttttgcgctgcatcaactttctggaaacccctaacgacggcgccatgaccctcgacggccagacaatccgcatggtcagcgaccgccacggcatgcgcgtggccgacgacgccgagctgcagcgcctgcgcacgcggctggcgatggtgttccagcatttcaacctgtggagccacatgagcgtgctggaaaacatcaccatggccccgcgccgggtgctgggctgcagcaagaaagacgccgaagaccgcgcccgccgctacctcgacaaggtcgggctgccggcgcgcgtggccgatcaatacccggcatttctgtctggcggccaacagcaacgtgtggccatcgcccgcgccctggccatggaaccggaggtgatgctgttcgacgaacccacctcggccctcgacccggagctggtcggtgaggtgctgaaggtgatccaggggctggccgaggaaggccgcaccatgatcatggtcacccacgagatgagctttgcgcgcaaggtgtcgagccaggtgctgtttttgcacaaaggcctggtggaagagcaaggcgcgcccgaggatgtgctgggcaacccgaagagcgagcgcctgcaacaattcctgagtggcaatttgaagtaaacctttgcggcgcctggagggtctttgaaagagagcctccagagcgtcagccgccgaatggcaaaacctgtcgacttcgccaaaaaatggtttgccgccaaaggctggaagccgtttgccttccagaaagccgtgtgggcagcggtgaaggacggtcagtccggtttgctgcatgccagcaccggcgcgggcaaaacctacgcgctgtggtttgcggccctcaatcgtttcgccatcactcgcccgcctgtcaccgcaaagcgtaaaccgcctgccgagcctttgactgtgctgtggatcacgccgatgcgtgcgctggctgccgacaccacgcgcgcccttgaggcgccattgcaggcgctgcagattccgtggagcgtcggcctgcgtaccggcgacaccagcagcagcgagcgcgcgcgccagacccgccgccagcccaccgcactggtcaccaccccggaaagcctgacgctgatgctcgcccgcgccgacagcgaggtgagcctgggccacctgcgcatggtgatcgtggatgaatggcatgaactgatcggcaacaaacgcggcgtgcagctgcaactggccttggcgcggctgcggcgctggcatcctgacttgatggtgtgggggatttccgcgaccctcggtaatcaggctcacgcgctggaggtattggtcccacaaggtgacgggatcaatgtacaggggcagaccgccaagcaattgctggtcgacaccttgctgccgccggtcaccgagcggttcccctgggccgggcatattggcttgaagatgttgccgcaggtggtcgccgaggtggcctccagcagcagttgcctggtgtttaccaatacacgggcgcagtcggaaatctggtatcaggccatgctcgatgctcgcccggattgggccgggctgattgccttgcaccacggctcgctgtcgcgagagacccgcgactgggtggaacgggcgctgaaagacggtctgctcaaagccgtggtgtgcacgtccagcctggacctcggggtggattttctgccggtggagcgcgtgctgcagatcggctcggccaaaggcgtggcgcgcctgatgcagcgcgccgggcgctccgggcatgcgccgggacggccatcgcgggtgacgctggtaccgacccatagcctggaactggtggaggccgccgccgcccaggacgcgattgcgcagcggcgcatcgaagcacgggaatccccctgcaagccgctggacgtgctcgtacaacatttggtgagcatggcactcggtggcgggtttacgcctgacgccttgctctcggaagtacgcggcgcctgggcctataaagacctgaccgatgaggagtgggcctgggcgctggggtttgtgcgccatggcgggctgtcactgacggcctatcccgattaccgccgggtcgaacccgacgagcacggcatctggcgcgtgccggacgcccggctggcacggcggcaccgcatgagcgtgggcactatcgtcagcgatgcaagtatccagctgaaattctggagcaagggcggcggcggcaagaatctgggcagtgtcgaggaaggttttattgcacggctcaagcccggtgatggttttctgtttgccgggcgtttgctggagctggtgcgggtggagaacatgactgcatacgtgcgccgcagcaccgcgaagaaggccgccgtgccgcgctggaatggcgggcgcatgccactttccaatgagcttgcccaagccgtggtcgaacgctttgatgcggcggcacaggggcggtatgaaggcccggagatgcaggccgtgcaacccttgctacagacgcagttgcgctggtccggcctgccgacgcgcgaacgtttgctggcggaagcgctgaagtcacgcgaaggctggcacctgtttctctacccgttcgccgggcgtcaggtgcacctggggttggcaagcttgttggcatggcgagtcagccaacaacagccggtgacgttttcgattgcggtgaacgattacgggctggagctgttgagcgccacccccatcgattggccgcggttgttgaacgaggccttgctgagctcgaaaaacctgttggaagacgttgcagccagcctgaacgccggggaactggccttgcgccgctttcgtgagatcgcgcgcattgccgggctggtctttgccggttaccccggcgcgccgaaaagcacgcgtcaggtgcaggcctccagcggattgtttttcgaagtgttcaaacaatatgacccacagaacctgctgctgacccaggccggggaagaagtcctgcgcgatgagttggatattcgccggctggaagagacgttgcgtcatctgtcggcgctgaaactggacctgcttgtgatcgagcggccgacgcccctcgccttcccattattggtggagcgtatgcgtgaaagcatgagctcggaaaagttgtcggagcgtattgcgcggatggtcaaggatttggaaaaagtcgcggataacgggaagcgctgatgcactgctcactggtacttgaggatcaagagttgctgttgctggcggacaaggcggtgtattggcctgcgcgcaagtgcctgctgattgccgatgcgcactttggcaaggcctcggcctatcgcagcctgggccaacccgtgccgcaaggcactaccagcgaaaacctgctgaagctggatcggctgctggccgccttcgaatgcgcgcaggtgattttcctcggtgacttcctgcacggccccggttcccacgccagcggcaccttgagcgtgctgagagcctggcgtgtgcgccatcccgacctgaccatgacgctgattcgtggcaaccacgataaacgtgcaggcgatccacctgccgacctggggatcgaagtggtggcagagcccctgctgatgggcccgttcgccctgcagcacgaacctgaggttcactccacccaccatgtactggcggggcatgtgcacccggtgtatcgcctgcgtggcaagggccggcagagcctgcgcctgccctgctttcagatcggcaggcgcatgagcctgctgcccgcgttcggggcattcaccggaggctattcagtggaaagaaacgacaatcagcaaatctttgtagtgggcgatcaagcggtgtggccagttcagtgaagaacgggccacacctgaatgatcacgcgaccggcgcaggtggcggctcgtccggaagtaccggttcgccaggttcggtcggttggggataatcagggtcgggctgaccgggaataccgcctgcaaaggcggggtcggccatcagggaccaggccagaacaccaatctggttgggttcaagccgggcgagttcggcgcttattcgcgggtcgatcttcataaagtactcctcaagcgtggcccggcgcgctttgcacgcgccgaggcagtacacccaatagagtcacttcctgcagacaaattcccttggcgtgtaagacctttcgatcaagcgcgtgggagcgtaacgccacgctggccctgatacttgccggcacggtctttataggacacttcacaggcctcgtcggactgcaggaacagcatctgtgccacaccctcgttggcgtagatcttcgccggcagcgtcgtggtgttggagaactccagcgtcacgtggccttcccactcaggttcaagcggggtcacgttgacgatgatgccgcaacgggcgtaagtgcttttacccaggcagatggtcaacacgtcgcggggaatacggaaaaactccacggtgcgcgccagggcaaaggagtttggcgggatgatgcacacatcgctcttgacgtcgacgaagcttttttcgtcgaagttcttcggatcgacgatcgccgaattgatgttggtgaacaccttgaattcatcggcgcagcgcacgtcgtagccatagctggacacaccgtaggagatcacccgatcagtgccttcgccacggatttggcgctctacgaagggttcgatcatgccgtgctcttgcgccatgcggcgaatccacttgtccgatttgatgctcatggcgggtgtcctgaatagcgaggtggaaaaattctgtgtggcatcttaccggggccagcgttggggttcaaagggcgcagggcatttcttgatgaatgcacgacgctctataagccacagccagcggggccgggacccgaattgccgtgcgcagtgaccgtaaataccaccgccagtcacgaaaatggataaaccttgggaaataccattggcacgtcccggaaaaagggttaaggtggcgccactgtgctgcttgtgtcactgagaatctctacacgatatgttgaatttcgatccaaccatctccaagaatttttcctgctctttgcactcagtctcggccagggcttttcctgagtcgcagttaactttgtccaaggagatacaccatgtctaatcgccaaactggtaccgttaagtggttcaacgatgaaaaaggcttcggcttcatcactccacaatccggtgacgacctgttcgttcacttcaaagctatccaatccgacggcttcaaaagcctgaaagaaggccaacaggtttctttcatcgctacccgcggtcagaaaggcatgcaagctgaagaagttcaagttatctaacttgtactgacttagtcgaaaaaccccgcccttaaaagcggggtttttttatgcctgggatttggtaatgcccggcataaaaaatgtgggagccctgcatcatgcgggagttggcttgcctgcgatagctaaacccggtttttcagttacaccgaggcgatgccatcgcaggcaagccagctcccacacaagcccggctcccacatttcagggtgcgtcgcttactggaacaacgactcactcgacaagccattcttctcaaggatctcacgcaagcgcttgaggccctccacctggatctgccgcacccgctcacgggtcaggccgatctccagacctacatcctccagggtgctgctctcatggccgcgcaggccgaagcggcgaatcaccacctcacgctgcttgtccgtaagctccgacagccactggtcaatactttgggaaagatcatcgtcctgcaacagctcacaaggatccgtcggacgatcatccgtcagagtgtccagcagggttttatccgagtccggacccaatgagacatcgaccgaagacacgcgctcgttcaagccgagcatgcgcttgacctcccctaccggtttttccagcaggttggcgatttcttcaggcgagggttcatgatcgagtttttgagtcagctcacgtgccgcccgcaggtagacgttgagctccttgaccacatggatcggcaaccggatcgtgcgggtctgattcatgatcgcccgttcgatggtctggcgaatccaccaggtggcatacgtggagaagcggaagccccgctcagggtcgaacttctccaccgcccggatcaagcccaggttgccttcctcgatcaggtccaacagagacaagccacgattgacgtagcgtcgggcgattttcaccaccagccgcaggttgctttcaatcatgcgcttgcgcccagccggatcgcccttttgcgacaagcgcgcaaaatggacttcttcttcgggggtcagcagaggggaaaagccgatttcattgaggtacagctgggtcgcgtcgagcgcccgcgtgtagtcaatgtacttgtgttgctttaacgcggtggagttcttggatttggtgcgaactgaaggtgcagctgacccttcatcattcgacatcgattccttttcggtgagaatctccatttcaaggagaacctcatcgtcgatgtcaaactccggcgcttctttactgagagccattgttatagtcctttggtgagttcgacctcaagctcaagcgacgcctttatccttggcaacgctggagcctgttccttctacgtgagggaacaggctgtgcaacacatcaacgacggggcaggaattgcagcggatctacaggtttcccttggcggcgaatctcaaagtgcagtttcacccggtctgtaccagttgaccccatttcggcaattgtctgtccgactttgacctgctgcccctcccgaaccaacagcctacggttgtggccgtaagcactgacgtaggtatcgctgtgtttgatgatgaccagctcgccgtagccccgtaaaccactcccggcgtacaccactgtcccatcagacgcagctaaaacaggctgtcccaaatccccggcgatatcaatgcctttattcaaactaccgtttgaagagaattttccaatcaatacaccgttcgaaggccacccccaaccggtcggcgcaggccctgcaggtggcaacggcgcgggtgccggtttgttcgcaaccgtaggcgcagcggtgcctgcaggccgggtgatgatcgtggttttgctcgaagacgacggcgaagatccggtgtttgtcacaactgccacaggcgcagaaccggtgcgcccgtcgaagcgaatggtttgccccggatgtatcgtatatggcacaggaatattgttacgagctgcgagcgccttgtaatcccaaccataacggaaagcgatcgagaacatcgtgtcgcctttgcgcaccacatattgcccggtggtgaccgtcggcttttgcggcacggcactggcgcttgttcggtcgacaaccctggcgccactggatggcgagctggaacaccccaccaataccgaactcaagacaaggccaagcaccagtcgctgaaaacttgttttactcatacgctgcgcaagacctgtgagactcacccgccgctccctttgtggtggctgaacatgaatgcctgtatcaggcttgaaatatgtcgcaagtataactgggcattggctttttaccggcacacgactgaaacgaaaaattcatcatgtttaaaaccggttgttgatcatgttgactcaactgaccccgccgtaagacacatccccgccaacagaattcactgccggcgaacaaatgatcaggccaacgggccattgagcaatggcacaaagcgcacagcgcccagcacatgccgtgaaaagccctcctcctcacggataatgagcatcaattgttgcacttcaccggaacccaccgggataaccagccgcccgccaggcgcgagctgatccagcaaggcctggggcacgtcagtcgccacggcggtgacgataatgccgttatacggtgccagcgccggccagccttcccagccgtcaccccagcggaacaccacattgcgcaggttcaactccaccaggcgctccttggcgcggtcctgcaggaccttgatgcgctccaccgagaacacccgctccaccaactgtgacagcacggccgtctggtagcccgaaccagtaccaatctccagcaccttgtccaacggcccagccgccaacagcagctcgctcatgcgcgccaccatataaggctgggagatggtctggttgtggccgatgggcagcgcggtgtcctcataggcacggtgcgccagggcctcatcgacaaacagatgccgcggtgtacggcggatgacttccagcacctgggcgttggacaggccttcttcgtacaggcgctggatcaaacgctcgcgggtgcgctgggaggtcatgccgataccacggcgcagcatttcgtcttgttcacgcgccatcaacgcagcccctcaagccagccatcgaggctactgaaggcatcactgaaggtgcgatcaagttgcaacggggtaatcgaaacataaccttgcatcaccgcatgaaagtccgtgccggggccaccgtcttcagcgtcgcctgccgccgcgatccaatagccttccttgccacgcgggtcgaccactttcaagggcgccgccgcacgggcgcgatggcccaggcgcgtcagctgaataccgcgtatatgatcgaggggcaagttggggatattgacgttgagcaccgtgcgcggcggcaactccagggaaccgtgagcttgcaccagcttgcgcgcgaagtacgccgctgtcgccaggttatccagctgccgcgaggcgaaggaaaacgcgaacgaagtccggccgagaaagcgcccttcaagggccgccgccacggtgccggaatacagcacgtcatcgcccaggttggcgccgaggttgatgcccgacaccaccagatccggctcctggtccaacaggctgttgatcgccaggtgcacgcagtcggtgggggtaccgttcacgctgataaagccattggccagaacctgggggtgcaacggacggtcgagcgtcagcgaactgctggcgccgctcttgtcctggtccggggcaaccaccacacactcggcataatcttgcagcgcgccatagagcgcggcaagaccgggtgcggtggcaccgtcatcgtttgatatcagaatacgcatgggctgtccgtctgccccaccggcaccagatcaacaagctcgcgcaccaagacagtggcgaagcatccagccggcaggacgaattccaattgcagaatgtcaggcccggaataatgccacgtcaacccgccaatgggcagtcgcagaatgcgacgttcctggctcatgcccgcgctcaccagccaatcgcgcagctcaggttcactggcggcaaccttttgctcaagctcatgggtcgcgccggcagccggcgaatcaccctcgccccactgcggcccggttgggtgcagatccagaatcgccaggcgcgggtcgctgcattcagcctcccccgccgggaagaaactgcgactgtcggtgaacgccagcaagtcgcccacctgggcgcgctgccaggaaccgtctgcaacccgcgccgccagtactttgttgaacaggaaactgcgggcggtagacaacaaccgcgaacgcacattgcgctgctccggcaaagccttgcgcactgcccagtcacgggcatccacgacgttaccgccgttatggccgaagcgctgggtgccgaaatagttgggaatgccgtgcctggcgatctgttgcaagcgcgcgtcgatggcggcggcatcaccggcaaactgggtcaggcgcaaagtgaaaccgttggccgagtgcgcgccacgttgcagctttcgcttgtggcgggcgattttgagaatcttgagcgtgtcgttttccgccgcgctcatgtccgggtcggccttgccgggcagttgcacgctgaaccattggcgagtcaacgcctggcgatccttgagcccggcataactgaccgtgcgcaggggcacgccggccgccttggcgatacgccgcgcggcctcttcggtattcagcccgcgcttttccacccacaaccacaggtgctcgccatcgccggtcagcggaatgtcgaggacttcatcgacctgaaaatcttcagccgtcgctttcaggaccgcgctgcccagcgcctcgccataggcccgtgggcccagcaattgcagatcattcatgcgcgcagcaacaaggcgacggagtgcaccgcgatgccctcttcacgaccggtaaacccgagcttttcggtggtggtggctttcacgttgacttgatccagttcaatttgcaggtcggcggcaatcagtgcgcgcatcgattcgatatgcggcgccattttcggcgcctgggccacgatggtgttgtcgacgttgccgaccttccagcccttggcgtggatcaggccgaccacatggcgcagcaaaacacggctgtccgcccccttgaaggtagggtcagtgtccggaaaatgtttgccgatatcacccaacgcggccgcgccgagcaaggcatcgctcaaggcatgcaacacaacgtcgccgtcggaatgagccagcaacccatggtggtgcgagatgcgcacgccacccagggtgatgaaatcgccttcggcgaaacggtgcacatcgtagccgtggccaatacgcataaaaaaacgccccgatttaattcagggcgtgattctacctacttttgcctcacattaaccgagcaaagcgcggccatggtgtcgcaaatgatcttcgatgaagctggcgataaagaagtaactgtggtcatagccgggttgcaggcgcaattgcaacggatggttggctgccttggcggcttgttgcaaagcttcaggcttgagttgcacggccaggaaatcgtcgcgatcaccttgatccaccagcagcgcaagcttttccgaggcttcgctgatcagcacgcaggcgtcccattcgcgccatttggagcgttcttcacccagataacgggagaatgctttttgaccccacgggcaatccatcggattactgatcggtgaaaacgccgacaccgactggtagcgcccagggttgcgcaacgcgcagaccagcgcgccgtggccacccatcgaatggccgctgatgccgcgcttgtccgaagcggggaaatgcgcctcaaccaacgcaggcaattcctgcactacatagtcatgcatccgataatgcttggcccagggttcctgcgtggcattgaggtaaaagccggccccgaggccaaaatcccaggcattgtccgggtcgcccggcacacctggcccacgcgggctggtatccggcgcaacgataatcagccccagctcggcggccatgcgctgagcaccggccttctgcatgaagttttcatcggtacaggtcaaaccggacaaccaatacagcaccggcagcttgccaccctgctccgcttgcggcggcaggtagacggcaaacgtcatgtcgcaacccaacacgtcggaatgatgtttgtagcgtttatgccagccgccgaagctcttctggcaggacaggttttccagactcatggccgacctcagaagtggatgacggtacgaatgctcttgccttcatgcatcaggtcaaacgctttgttgatgtcttccaggcccatggtgtgggtgatgaaagtgtccagcgggatttcgccggtctgggccatttccacatagctcggcaattcggtacggccgcgtacgccgccgaacgccgaaccgcgccagacgcgaccggtgaccagctggaacgggcgcgtggcgatttcctggccggcaccggccacgccgatgatcaccgactcgccccagcctttgtggcagcactcaagcgcggcgcgcatcagttgcacattgccgatgcactcaaaggagaaatccacgccgccgtcggtgaggtcgacgatcacgtcctggatcgggcggtcgtagtctttcgggttgatgcagtcggtagcgcccagttgcttggcgatctcgaacttggccgggttgatgtcgatggcgatgatgcggccggccttggctttgactgcaccgatgactgccgacaggccgataccgcccagaccgaagatggccacggtgtcgcccggtttgaccttggcggtgttgatcactgcgccgatgccggtggtgacgccgcaccccagcaggcagactttttccagcggcgcctctttaggaatcttggccacggagatttccggcaacacggtgtactcggaaaacgtcgaggtgcccatgtaatggaaaatcggctggcccttgtaggaaaagcgcgtggtgccgtctggcatcaagcccttgccctgggtcgaacgaatggcctggcacaagttggtcttgcccgacaggcagaacttgcacttgccgcattcaggggtatacagcgggatcacgtggtcgccaacggccaccgaggtcacgccctcgccgatcgcttcaaccaccgcaccgccttcatggccgagaatcgacgggaagatgccttccgggtctgcgcctgacagggtgtaggcatcggtgtggcacacgccggacgcgaccacccgcaatagcacctcgcccgccttgggcatggccacatccacttccactatctcaaggggcttcttggcttcgaaggctacagcggcgcgggatttgatcatccgggtttctccatggcgttaaaaactgaggcatcgagtgtaaaacatggcttattgattaataatccgaaccaaagcaaaacattattgctgtatggggataatcaacatgctggaaaaccgctgggaaggcatcgatgaatttgtcgccgttgccgaatgcagccaattcacggcggcagccgagcggctgggtgtgtcgtcatcgcacatcagccggcaggtggcgcgcctggaagagcggctacagacgcggttgctgtatcgcagtacgcgcaaggtgacgctgaccgaagccggccagacctttctgcagcattgccagcggttgcaggacggccgtgaagaagccttgcgtgcggtcggcgacctcaccagcgaacccaagggcatgttgcgcatgacctgcgcggtggcgtacggcgaacgctttatcgtgccgttggtgacgcgcttcatggggctttatccgcaattgcgcgtcgacgttgaactgaccaatcgccaacttgacctggtacacgaaggcctcgacctggcgattcgcctgggccgcctgcaagactcacgcatggtcgccagtcgcctggcaccacggcgtatgtacttgtgtgcgtcaccgtcctacctcgagcggtatggacggccacatagcttgtcggaattgagccggcataactgtttgatcggcagctcggatatctggcaaatggcccaggacgggcgcgagttttcccagcgggtgcaaggcaattggcgctgcaacagcgggcaggcggtgctggatgcggcgttgcagggagttgggttgtgccagttgccggattattacgtgctggagcacttgcacagtggcgcgctggtgtcgttgctggaagcgcatcagccgccgaatacggcggtgtgggcgctatatccgcagcagcggcatttgtcgccgaaggtcaggaagctggtggattttttgaaggtggggttggcacagcggccggagtacagcagctaattatgggttgtctgcccgggcctcatcgcaggcaagccagctcccacacctggaacacattcccctgtgggagctggcttgcctgcgatgaagtcgacgcgatctaactgactactgccgattagcccaccgcaaccgcaaccactccaaatcctcaggccgggtcaccttgatattgtccgagcgcccttcgatcaaccgcggtgcctggccggaccactccatcgccgaagcttcgtcggtgatcaccgcatccgccaccaagctgtcagccagggcacggtgcaaggcgccgaggcggaacatctgcggcgtgtaggcttgccagatcaggctacggtcgacggtttccaccacgcggccgtgtttgtcgacgcgcttgagggtatcgcgagccggcaccgccagcaagccgcccaccggatcatctgccagctcggccagcagcttatcgaggtcatcgcggctcaggttgggccgcgccgcgtcgtgcaccaacacccagtcgtcatcgctggcgccctgggcattgagttgcagcaacgcattgagtaccgagcccgagcgctcgtcgccaccgtccgcacgcaggatgcgcgggtcgttggcgcacggcaaacttggccaatagggatcatcgatagcgacactgaccaccagccccttgaggccggggtggtcgagaaaacagccaaggctgtgttcgagaattgtgcgcccgcccaattgcagatactgcttgggacggtccgcggccattcgggcaccaatgcccgcggcaggaatcacggcccagaaggccggcagagagtcgatcattgggccaactgataaagggtttcgccgtccttgaccatgcccaactcatgacgagcccgctcttcaacggtctccgtgccttttttcagctccagcacttcagcgtcaagcacgcggttacgctccagcaggatttcgttttcggcgtgttggtcggcaatttgctgggtcagctcttttacctgcgcaaagctgccattaccgacccataggcggtactgcaggccagccagcaacaagagcaagacgaggaacaaccaattgggactgcgcatcgaaatccgggtatccagtaaaaaaagacagccatgcaaaacttttgcagcaactgatagcacgaagcctggaaaaaccaggcttgtgcttgatagccatcagattagcgtcgaaatccacactgttgtgttttttccgacgcaatccgcaagctttttaccatcgatcaatcagccgcgaaactcgctgcggccgttgtacttggctttacccgccaattgctcttcgatacgcagcaattggttgtacttggaaacgcggtcggaacggcacagcgaaccggtcttgatctggcctgccgaggtgcccacggccaggtcggcaatggtcgaatcttcggtttcaccggagcggtgggagatcacggcggtgtagcccgcagccttggccatctggatggcttccagggtttcggtcagggtgccgatctggttgaacttgatcaggatcgagttggcgatctttttgtcgatgccctctttcaggatcttggtgttggtcacgaacaggtcgtcgcccaccaattggatcttctcgccgatcttgtcggtaaggactttccagccagcccagtcggactcgtccaggccgtcttcgatcgagatgatcgggtagcgctcggtcaggcctttgaggtagtcagcgaaaccttcggaggtgaatacgtggccttcaccggacaggttgtacttgccgtcttcgtagaattcgctggccgcgcagtccagggccagggtcacgtcggtgcccagcttgtagccagcattggcaacggcttcggagatcactttcagtgcatcttcgttggacgccaggttcggcgcgaaaccaccttcgtcgcccactgcagtgctcaggccacgggccttcagcacagccttgaggtgatggaaaatctcggtgcccatgcgcaggccttcggagaaggtcttggcgccaaccggctgcaccatgaattcctggatgtcgacgttgttatcggcgtgctcgccaccgttgatgatgttcatcatcggaaccggcatcgagtacacacccggggtgccgttcaggttggcgatgtgggcgtacagcggcaggtcctggtcctgggcagcagccttggcagcggccaaggacacggcgaggatggcgttggcgcccaggctgcctttgttttcggtgccgtcgagcttgatcatcgcgtggtccagggctttctggtccagcgggtccttgcccagcagcaggtcacggatcgggccgttgatgttggcgacggccttgagtacacctttgcccaggtaacggctcttgtcgccatcacgcagttccagcgcttcgcgcgaaccggtagaagcaccggacggcgcgcaggcgctgccgatgatgccgttatcgagaagcacgtcggcttcgacggtggggttgccacgggagtcgagaacttcacgacctttgatgtcgacgatttttgccattgttgtaaacactccaaagttgacgaaaacgacgcagctgaaggaaatcttttgaccgaccgcaagggtggaacaacggggcaggcttgcaggcgacaaggctcaggcccgcaggcctgagcgtaaaacgagggaaagtctaccggagaaacagggcttacgcggtctctaccgtcggaaaactcttgaccagttcgtccaactgcttgagctgggccaggaacggctccagcttgtccaggcgcagggcacaggggccgtcgcatttggcgttgtccgggtccgggtgagcctccaggaacaggccggccagggactggctgaggccggccttggccagatccaatacctgggcacgtcgcccaccggcggaatcggcacgaccacccggcatttgcagcgcgtgggtcacgtcgaagaacaccgggtattcgaactgtttcatgatgccgaaaccgagcatgtccaccacgaggttgttgtagccgaagctcgaaccgcgctcgcagaggatcaactggtcgttacccgcttccacgcacttgttcaggatgtgtttcatttcctgaggcgcgaggaactgggctttcttgatattgatcacagcgccggtcttggccatcgcgacgaccaggtcggtctggcgcgacaggaaggccggcaactggatgatgtcgcacacctcggcgaccacggcagcctgttcaggctcgtggacgtcggtgatgatcggcacgccgaaggcttgcttgatgtcctggaagatccgcatgccttcttcaaggcccgggccgcgataggacgtcacggacgaacggttggccttgtcgaagctggccttgaacacgtaagggataccgagtttctcggtgacccgcacgtactcttcacagacctgcatcgccatgtcgcggctttccagcacgttcatgccgccgaacagcaccatgggcttgtcgttggcaatctcgatgtcgcctacgcgaatgatcttctgggccatcaggtttacgccttcttctgatgttgcgtcagtgcagctttaacgaaaccggtgaacaacggatgaccgtcgcgcggggtcgaggtgaactcagggtggaactggcaggccacgaaccacggatgatccggcgcctcgaccacttcaaccagcttgccatcaccggaacgaccggagattttcaggccggcttctttgatctgcggcagcaggttgttgttcacttcataacggtgacggtgacgctcgacgatcacgtccttgccgtagcaatcgtgaaccagcgaacccggctccagcaggcaatcctgcgcgccaaggcgcatggtgccgcccaggtcggaggtttcggtgcgggtttcgacggcgccggtggcatcttcccactcggtgatcaggcccacgaccgggtggccgctggtgtgatcgaactcggtggagttggcgtctttccagcccagtacgttacgcgagaactcgataacggccacttgcatacccaggcagatacccaggtacggcactttgttctcacgagcgtactgcacggcagtgatcttgccttccacgccacgcaggccgaaaccgcctggaacgaggatcgcatcaacaccttcaagcaaggcagtgccctggttctcgatgtcttcggagtcgatgtagcgcaggttgaccttggtgcggttgctgataccggcgtggctcatcgcttcgatcagcgacttgtacgcgtccagcagttccatgtacttgccgaccatggcgatggtgacttcgtgttccgggttgagcttggcgtcaaccaccgcttcccactcggacaagtccgcgccattgcattgcaggccgaaacgctcgactacaaaatcatccaggccttgcgaatgcaggatgcccgggatcttgtagatggtatcggcgtcttccagcgcaatcaccgcacgttcttcaacgttggtgaattgcgcgatcttgcgacgcgaagagatgtcgatcgggtgatcggagcggcacaccagcacgtccggctgcaggccgatggagcgcagttccttcaccgagtgctgggttggcttggttttggtttcgccagcggtggcgatgtacggcaccagggtcaggtgcatcagcatcgcgcgcttggcgccgacttcgaaacgcagctggcggatggcttcgaggaacggttgggattcgatgtcacccacggtgccaccgatctcgaccattgccacgtcggcatcgcctgcacccttgatgatgcggcgcttgatttcatcggtaatgtgcggaatcacctggatggttgcacccaggtagtcaccacggcgctctttgcgcagcacgtgctcgtagacacggccagtggtgaagttgttgttctgggtcatggtcgtgcggatgaaccgctcgtagtggcccaggtccaggtcggtctcggcgccgtcgtgggtgacgaacacttcaccgtgctggaacgggctcatggtgcccgggtcaacgttgatgtacgggtccagcttgagcatggtgaccttaagtccccgcgcctccaggatggccgccaatgaagcggaggcaatgcctttccccaatgaagaaacaacaccgcccgtgacgaatatgtagcgcgtcatgaaaaaccctagaagtctgcgttaaagcggtccgagccgccggggaaagcgaaggaaggccgaagcccccgatcacctgcattaatcacagtgcacctttcaaaaaaaccgccgcgtggtgacagaccagcaatgaaacaccggtacgttgatcgctacacattttttggaatcgcccagcaaagactgcttggtaatcggcaacaactgcgattcaggcgaatccacagaagttgtatcaagaagggagcgtagtctaccggaaaggctctatcagctcaaaccttgatcgcaggtctgtggcatccaatgtaattgccactcatccgacgaactgcgccatagccccgcaagggttgggacagccagcaattgctcgccccgatacagcagcggcaatctgccacggatgaagcccggtaacgcactttcgttaagcaggcgtttcaggtcacgccggccgcgacctggcacttcgatgatttcaccgccctgccgatagcggatcaccaaagggccttcgggcgccgcaccgataaattccagccggccgttgccgggtaactcaagcgagttttgcgggtgcggccagctcaccggcgcatcggaaaactcccgccaagcagtgggcaaccaccaaatgcgctcggcgcaacggtgcaactcaccgtcggcgaggcgccataggggctttgcgtcacctttcgcgtcacgcagggaatgccagccggcccagtggtcgctatcgggtaaacgggtcagaggcgtcagccagtggcgcaaggcgttgcgttgccgggcgtcggacagttcgcgcaacgaggtcagcgccagcgacggcaagggcaaccacggaaacggcgaaggcaggtcagcggcgagcacgtccatttgcgcaagctcatccagcaagccgtgggcctcgctcaaatgttcggcggtgcgcgccaggcttgagacggcctggggccagcgctcagtcagcaccggaaatacgcgatggcgcaggtaattacgggaaaaacgcgagtccgcattggaaggatcttcgatccatttgagctgatgctcgcgggcgtaagcttcgagctcattgcgcgacacacccagcaacggccgcaccagatgaccacctgccaacg
